(19) United States
(12) Patent Application Publication
(10) Pub. No.: US 2010/0233704 A1
(43) Pub. Date: Sep. 16, 2010

(54) METHODS OF DETECTING LUNG CANCER

(75) Inventors: Bernard MICHOT, Pern (FR); Olivier DELFOUR, Caraman (FR); David H. PERSING, San Martin, CA (US)

Correspondence Address: ANDRUS, SCEALES, STARKE & SAWALL, LLP, 100 EAST WISCONSIN AVENUE, SUITE 1100, MILWAUKEE, WI, 53202, US

(73) Assignee: CEPHEID, Sunnyvale, CA (US)

(21) Appl. No.: 12/713,072

(22) Filed: Feb. 25, 2010

Related U.S. Application Data
(60) Provisional application No. 61/155,364, filed on Feb. 25, 2009.

(51) Int. Cl. C12Q 1/68; C07H 21/00

(52) U.S. Cl. 435/6; 536/23.1

(57) ABSTRACT

Methods of lung cancer in a sample from a patient are provided. Methods of detecting changes in expression of one or more target RNAs associated with lung cancer are also provided. Compositions and kits are also provided.

[0001] This application claims priority to U.S. Provisional Application No. 61/155,364, filed Feb. 25, 2009, which is incorporated by reference herein in its entirety for any purpose.

### 1. BACKGROUND

[0002] Lung cancer is the leading cause of death due to cancer in the world. Lung cancer is categorized into two types, small cell lung cancer (“SCLC”) and non-small cell lung cancer (“NSCLC”). SCLC is an extremely aggressive form of lung cancer with poor prognosis and a median length of survival after diagnosis of about 1 to 3 months. About 80% of lung cancer cases are categorized as NSCLC, which is categorized into three sub-types: adenocarcinoma, squamous cell carcinoma and large cell carcinoma. Greater than 85% of all NSCLCs are either adenocarcinoma or squamous-cell carcinoma.

[0003] Lung cancer is difficult to diagnose in the early stages because it may manifest no outward symptoms. When symptoms do occur, they can vary depending on the type, location and spreading pattern of the cancer, and therefore, are not readily associated with cancer. Often, lung cancer is only correctly diagnosed when it has already metastasized.

[0004] Current techniques for diagnosing lung cancer include chest x-ray and/or computed tomography (“CT”) scan. Diagnosis by one of these techniques is usually confirmed by a more invasive procedure, such as transthoracic needle biopsy or transbronchial biopsy, which may still result in misdiagnosis of lung cancer. (Butnor (2008) Arch. Pathol. Lab. Med. 132:1118-1132.)

[0005] Despite advances in treatment (e.g., by surgery, chemotherapy, radiation or a combination), the prognosis for lung cancer remains poor, with only 15% of patients surviving more than 5 years from the time of diagnosis. Of the most common NSCLCs, adenocarcinoma progresses more rapidly and therefore has a poorer prognosis than squamous-cell carcinoma, which takes several years to develop and is therefore more likely to be diagnosed in an early stage.

[0006] One proposal for reducing the mortality and morbidity of lung cancer is to institute regular screening of high-risk individuals, e.g., those who smoke or have smoked heavily for a certain period of time, in order to detect and treat lung cancer in asymptomatic individuals. In this way, early stage lung cancer can be eradicated by surgical resection, which is thought to be the only realistic option for a cure. (Field et al. (2008) Br. J. Cancer 99:557-562).

[0007] There remains a need for molecular markers in lung cancer.

### 2. SUMMARY

[0008] In some embodiments, methods of detecting the presence of lung cancer in a subject are provided. In some embodiments, a method comprises detecting a level of at least one target RNA in a sample from the subject. In some embodiments, the at least one target RNA: (i) is capable of specifically hybridizing to a nucleic acid having a sequence selected from SEQ ID NOs: 1 to 397, 1063 to 1210, 2064 to 2183, 2673 to 2680, and 2689; or (ii) comprises a sequence that is complementary to at least 15 contiguous nucleotides of a sequence selected from SEQ ID NOs: 1 to 397, 1063 to 1210, 2064 to 2183, 2673 to 2680, and 2689; or (iii) comprises at least 15 contiguous nucleotides of a sequence selected from SEQ ID NOs: 794 to 1043, 2576 to 2672, and 2692. In some embodiments, a level of at least one target RNA in the sample that is greater than a normal level of the at least one target RNA indicates the presence of lung cancer in the subject. In some embodiments, the method further comprises comparing the level of the at least one target RNA in the sample to a normal level of the at least one target RNA.

[0009] In some embodiments, methods for facilitating the detection of lung cancer in a subject are provided. In some embodiments, a method comprises detecting a level of at least one target RNA in a sample from the subject. In some embodiments, the target RNA (i) is capable of specifically hybridizing to a nucleic acid having a sequence selected from SEQ ID NOs: 1 to 397, 1063 to 1210, 2064 to 2183, 2673 to 2680, and 2689; or (ii) comprises a sequence that is complementary to at least 15 contiguous nucleotides of a sequence selected from SEQ ID NOs: 1 to 397, 1063 to 1210, 2064 to 2183, 2673 to 2680, and 2689; or (iii) comprises at least 15 contiguous nucleotides of a sequence selected from SEQ ID NOs: 794 to 1043, 2576 to 2672, and 2692. In some embodiments, a method comprises communicating the results of the detection to a medical practitioner for the purpose of determining whether the subject has lung cancer.

[0010] In some embodiments, detecting a level of at least one target RNA in a sample comprises hybridizing nucleic acids of the sample with at least one polynucleotide that is complementary to a target RNA in the sample or to a complement thereof; and detecting at least one complex comprising a polynucleotide hybridized to at least one nucleic acid selected from the target RNA, a DNA amplicon of the target RNA, and a complement of the target RNA.

[0011] In some embodiments, a method for detecting the presence of lung cancer in a subject comprises (a) obtaining a sample from the subject; (b) providing the sample to a laboratory for detection of the level of at least one target RNA in the sample; and (c) receiving from the laboratory a communication indicating the level of at least one target RNA in the sample. In some embodiments, the at least one target RNA (i) is capable of specifically hybridizing to a nucleic acid having a sequence selected from SEQ ID NOs: 1 to 397, 1063 to 1210, 2064 to 2183, 2673 to 2680, and 2689; or (ii) comprises a sequence that is complementary to at least 15 contiguous nucleotides of a sequence selected from SEQ ID NOs: 1 to 397, 1063 to 1210, 2064 to 2183, 2673 to 2680, and 2689; or (iii) comprises at least 15 contiguous nucleotides of a sequence selected from SEQ ID NOs: 794 to 1043, 2576 to 2672, and 2692. In some embodiments, a level of at least one target RNA that is greater than a normal level of the at least one target RNA indicates the presence of lung cancer.

[0012] In some embodiments, levels of at least two, at least three, or at least five target RNAs are detected. In some embodiments, detection of levels of at least one, at least two, at least three, or at least five target RNAs that are greater than a normal level of the at least one target RNA indicates the presence of lung cancer.

[0013] In some embodiments, a method further comprises detecting a level of at least one target RNA that: (i) does not specifically hybridize to a nucleic acid having a sequence selected from SEQ ID NOs: 1 to 397, 1063 to 1210, 2064 to 2183, 2673 to 2680, and 2689; or (ii) does not comprise a sequence that is complementary to at least 15 contiguous nucleotides of a sequence selected from SEQ ID NOs: 1 to 397, 1063 to 1210, 2064 to 2183, 2673 to 2680, and 2689; and (iii) does not comprise at least 15 contiguous nucleotides of a sequence selected from SEQ ID NOs: 794 to 1043, 2576 to 2672, and 2692.

[0014] In some embodiments, a method comprises detection of at least one target RNA (a) is capable of specifically hybridizing to a polynucleotide sequence in Table 6; or (b) comprises a sequence that is complementary to at least 15 contiguous nucleotides of a polynucleotide sequence in Table 6. In some such embodiments, detection of a level of the at least one target RNA that is greater than a normal level of the at least one target RNA indicates the presence of non-small cell lung cancer.

[0015] In some embodiments, a method comprises detection of at least one target RNA (a) is capable of specifically hybridizing to a polynucleotide sequence in Table 7; or (b) comprises a sequence that is complementary to at least 15 contiguous nucleotides of a polynucleotide sequence in Table 7. In some such embodiments, detection of a level of the at least one target RNA that is greater than a normal level of the at least one target RNA indicates the presence of squamous cell carcinoma.

[0016] In some embodiments, a method comprises detection of at least one target RNA (a) is capable of specifically hybridizing to a polynucleotide sequence in Table 8; or (b) comprises a sequence that is complementary to at least 15 contiguous nucleotides of a polynucleotide sequence in Table 8. In some such embodiments, detection of a level of the at least one target RNA that is greater than a normal level of the at least one target RNA indicates the presence of adenocarcinoma.

[0017] In some embodiments, a method comprises detection of at least one target RNA (a) is capable of specifically hybridizing to a polynucleotide sequence in Table 9; or (b) comprises a sequence that is complementary to at least 15 contiguous nucleotides of a polynucleotide sequence in Table 9. In some such embodiments, detection of a level of the at least one target RNA that is greater than a normal level of the at least one target RNA indicates the presence of aggressive lung cancer.

[0018] In some embodiments, a method comprises detection of at least one target RNA (a) is capable of specifically hybridizing to a polynucleotide sequence in Tables 32 or 33; or (b) comprises a sequence that is complementary to at least 15 contiguous nucleotides of a polynucleotide sequence in Table 32 or Table 33.

[0019] In some embodiments, a method of detecting the presence of lung cancer is provided that comprises detecting a level of at least one target RNA in a sample from the subject, wherein the at least one target RNA (i) is capable of specifically hybridizing to a nucleic acid having a sequence selected from SEQ ID NOs: 1 to 397, 1363 to 1707, and 2312 to 2452; or (ii) comprises a sequence that is complementary to at least 15 contiguous nucleotides of a sequence selected from SEQ ID NOs: 1 to 397, 1363 to 1707, and 2312 to 2452. In some embodiments, a level of at least one target RNA in the sample that is reduced relative to a normal level of the at least one target RNA indicates the presence of lung cancer in the subject. In some embodiments, a method comprises comprises comparing the level of the at least one target RNA in the sample to a normal level of the at least one target RNA.

[0020] In some embodiments, a method of facilitating the detection of lung cancer in a subject is provided, comprising (a) detecting a level of at least one target RNA in a sample from the subject, wherein the at least one target RNA (i) is capable of specifically hybridizing to a nucleic acid having a sequence selected from SEQ ID NOs: 1 to 397, 1363 to 1707, and 2312 to 2452; or (ii) comprises a sequence that is complementary to at least 15 contiguous nucleotides of a sequence selected from 1 to 397, 1363 to 1707, and 2312 to 2452; and (b) communicating the results of the detection to a medical practitioner for the purpose of determining whether the subject has lung cancer.

[0021] In some embodiments, a method of detecting the presence of lung cancer in a subject is provided, wherein the method comprises (a) obtaining a sample from the subject, (b) providing the sample to a laboratory for detection of the level of at least one target RNA in the sample, wherein the at least one target RNA (i) is capable of specifically hybridizing to a nucleic acid having a sequence selected from SEQ ID NOs: 1 to 397, 1363 to 1707, and 2312 to 2452; or (ii) comprises a sequence that is complementary to at least 15 contiguous nucleotides of a sequence selected from SEQ ID NOs: 1 to 397, 1363 to 1707, and 2312 to 2452; and (c) receiving from the laboratory a communication indicating the level of at least one target RNA in the sample. In some embodiments, a level of at least one target RNA that is reduced relative to a normal level of the at least one target RNA indicates the presence of lung cancer.

[0022] In some embodiments, a method further comprises detecting a level of at least one second target RNA in a sample from the subject, wherein the at least one second target RNA: (i) is capable of specifically hybridizing to a nucleic acid having a sequence selected from SEQ ID NOs: 1 to 397, 1063 to 1210, 2064 to 2183, 2673 to 2680, and 2689; or (ii) comprises a sequence that is complementary to at least 15 contiguous nucleotides of a sequence selected from SEQ ID NOs: 1 to 397, 1063 to 1210, 2064 to 2183, 2673 to 2680, and 2689; or (iii) comprises at least 15 contiguous nucleotides of a sequence selected from SEQ ID NOs: 794 to 1043, 2576 to 2672, and 2692. In some embodiments, a level of at least one second target RNA in the sample that is greater than a normal level of the at least one second target RNA indicates the presence of lung cancer in the subject.

[0023] In some embodiments, a method comprises isolating nucleic acids from a sample. In some embodiments, the nucleic acids comprise RNA that has been separated from DNA. In some embodiments, a target RNA in its mature form comprises fewer than 30 nucleotides. In some embodiments, a target RNA is a microRNA.

[0024] In some embodiments, synthetic polynucleotides are provided. In some embodiments, compositions comprising a plurality of synthetic polynucleotides are provided. In some embodiments, a synthetic polynucleotide comprises a first region, wherein the first region comprises a sequence of at least 8, at least 9, at least 10, at least 11, at least 12, at least 13, at least 14, or at least 15 contiguous nucleotides that is identical or complementary to a sequence of at least 8, at least 9, at least 10, at least 11, at least 12, at least 13, at least 14, or at least 15 contiguous nucleotides of one of SEQ ID NOs: 1 to 165, 254 to 360, 1063 to 1081, 1090 to 1190, 2064 to 2091, 2107 to 2168, 1363 to 1659, 2312 to 2440, and 2576 to 2680. In some embodiments, a synthetic polynucleotide comprises a detectable label. In some embodiments, the detectable label is a FRET label. In some embodiments, the first region is identical or complementary to a region of a target RNA. In some embodiments, the polynucleotide further comprises a second region that is not identical or complementary to a region of the target RNA.

[0025] In some embodiments, kits are provided. In some embodiments, a kit comprises a synthetic polynucleotide. In some embodiments, a kit comprises a composition comprising a plurality of synthetic polynucleotides. In some embodiments, a kit comprises at least one polymerase. In some embodiments, a kit comprises dNTPs.

[0026] Further embodiments and details of the inventions are described below.

### 3. BRIEF DESCRIPTION OF THE FIGURES

[0027] FIG. 1 shows an electropherogram obtained on an Agilent Bioanalyser 2100 to assess the quality of total RNA purified as described in Example 1 from A549 human adenocarcinoma cell line.

### 4. DETAILED DESCRIPTION

### 4.1. Detecting Lung Cancer

[0028] 4.1.1. General Methods

[0029] Methods of detecting lung cancer by measuring levels of target RNAs are provided. In some embodiments, methods are presented for detecting non-small cell lung cancer in a human. In some embodiments, a method comprises detecting altered levels of at least one target RNA relative to normal levels of the at least one target RNA. In some embodiments, elevated levels of one or more target RNAs are indicative of lung cancer. In some embodiments, reduced levels of one or more target RNAs are indicative of lung cancer. In some embodiments, the method comprises detecting an altered level of at least one target RNA that is capable of specifically hybridizing to a sequence selected from the sequences in Tables 1, 2, 6 to 9, 18, 20, 23, 27, 28, 30, and 32 to 34. In some embodiments, the method comprises detecting an altered level of at least one target RNA that is capable of specifically hybridizing to a sequence selected from SEQ ID NOs: 1 to 397, 1063 to 1210, 1363 to 1707, 2064 to 2183, 2312 to 2452, 2673 to 2680, and 2689. In some embodiments, the method comprises detecting an altered level of at least one target RNA selected from the microRNAs in Tables 4, 5, and 38. In some embodiments, the method comprises detecting an altered level of at least one target RNA that comprises at least 15, at least 16, at least 17, at least 18, at least 19, at least 20, at least 21, at least 22, at least 23, or at least 24 contiguous nucleotides of a sequence selected from SEQ ID NOs.: 794 to 1043, 2576 to 2672, and 2692. In some embodiments, the method comprises detecting an altered level of at least one target RNA that comprises a sequence that is complementary to at least 15, at least 16, at least 17, at least 18, at least 19, at least 20, at least 21, at least 22, at least 23, or at least 24 contiguous nucleotides of a sequence selected from SEQ ID NO.: 1 to 397, 1063 to 1210, 1363 to 1707, 2064 to 2183, 2312 to 2452, 2673 to 2680, and 2689. In some embodiments, an altered level is an elevated level. In some embodiments, an altered level is a reduced level. In some embodiments, a method comprises detecting an elevated level of at least one target RNA and a reduced level of at least one other target RNA. In some embodiments, the target RNA, in its mature form, comprises fewer than 30 nucleotides. The target RNA, in some embodiments, is a microRNA.

[0030] In the present disclosure, “a sequence selected from” encompasses both “one sequence selected from” and “one or more sequences selected from.” Thus, when “a sequence selected from” is used, it is to be understood that one, or more than one, of the listed sequences may be chosen.

[0031] Detection of a level of target RNA that is greater than a normal level of target RNA indicates the presence of lung cancer in the patient from whom the sample is taken. In some embodiments, the detecting is done quantitatively. In other embodiments, the detecting is done qualitatively. In some embodiments, detecting a target RNA comprises forming a complex comprising a polynucleotide and a nucleic acid selected from a target RNA, a DNA amplicon of a target RNA, and a complement of a target RNA. In some embodiments, the level of the complex is then detected and compared to a normal level of the same complex. The level of the complex, in some embodiments, correlates with the level of the target RNA in the sample.

[0032] “Non-small cell lung cancer” or “NSCLC” is one of two categories of lung cancer found in humans. About 80% of patients diagnosed with lung cancer have non-small cell lung cancer. NSCLC is further broken down into three sub-categories, depending on the cells in which they originate: (i) adenocarcinoma, which originates in the cells that line the alveoli and make substances such as mucus; (ii) squamous cell or epidermoid carcinoma, which originates in the squamous cells; and (iii) large cell carcinoma, which may originate in several different types of large cells. More than 50% of patients with NSCLC have either adenocarcinoma or squamous cell carcinoma. The histology class nonsquamous cell carcinoma includes both adenocarcinoma and large cell carcinoma.

[0033] Cancer can be divided into clinical and pathological stages. The clinical stage is based on all available information about a tumor, such as information gathered through physical examination, radiological examination, endoscopy, etc. The pathological stage is based on the microscopic pathology of a tumor.

[0034] The TNM (tumor, node, metastasis) system classifies a cancer by three parameters—the size of the tumor and whether it has invaded nearby tissues, involvement of lymph nodes, and metastases. T (tumor) is assigned a number from 1 to 4, according to the size and extent of the primary tumor. N (node) is assigned a number from 0 to 3, in which 0 means no spreading to the lymph nodes, 1 is spreading to the closest lymph nodes, and 3 is spreading to the most distant and greatest number of lymph nodes, and 2 is intermediate between 1 and 3. M (metastasis) is assigned 0 for no distant metastases, or 1 for distant metastases beyond regional lymph nodes.

[0035] For lung cancer, Overall Stage Grouping assigns a cancer a roman numeral of 0, I, II, III, and IV, and a letter, A or B, depending on the stage. Stage 0 is carcinoma in situ, which usually does not form a tumor. Stages IA (T1N0M0) and IB (T2N0M0) is cancer that is localized to one part of the body. Stage HA (T1N1M0) and IIB (T2N1M0 and T3N0M0) is cancer that is localized, but more advanced. Stage IIIA (T1-3N2M0 or T3N1M0) and IIIB (any T4 or any N3M0) cancer is also locally advanced. Stage 1V (any M1) is cancer that has metastasized. As used herein, the term “early stage cancer” refers to Stages IA and IB and Stages IIA and IIB cancers.

[0036] As used herein, an “aggressive” form of lung cancer is a lung cancer that advances quickly from one stage to the next and/or metastasizes at an early stage, resulting in a poor prognosis for the patient.

[0037] Tables 1 and 2, below, list 397 hybridization probes that have been found to be complementary to, and hybridize with, target RNAs in lung cancer cells. These target RNAs were detected at elevated levels or at reduced levels in certain primary tumors and/or human lung cancer cell lines (respectively Examples 1 and 2). Two hundred seventy-five of the probes are complementary to, and hybridize with, novel target RNA species that are expressed in human cells. The other one hundred and twenty-two probes are complementary to, and hybridize with, publicly known microRNAs that have been accessioned by others into miRBase (http://microrna.sanger.ac.uk/; see Griffiths-Jones S. et al. (2007) Nucl. Acids Res. 36:154-158). These latter probes are designated by either “mir” or “let” in Tables 1 and 2.

[0038] Tables 18 to 21, below, list hybridization probes that have been found to be complementary to, and hybridize with, target RNAs that were detected at elevated levels in certain primary tumors (see Example 4). Certain probes listed in Tables 18 and 20 are complementary to, and hybridize with, novel target RNA species that are expressed in human cells. Other probes in Tables 18 and 20 are complementary to, and hybridize with, publicly known microRNAs that have been accessioned by others into miRBase (http://microrna.sanger.ac.uk/; see Griffiths-Jones S. et al. (2007) Nucl. Acids Res. 36:154-158). These latter probes are designated by either “mir” or “let.”

[0039] Tables 23 and 24, below, list hybridization probes that have been found to be complementary to, and hybridize with, target RNAs that were detected at reduced levels in certain primary tumors (see Example 4). Certain probes listed in Tables 23 and 24 are complementary to, and hybridize with, novel target RNA species that are expressed in human cells. Other probes in Tables 23 and 24 are complementary to, and hybridize with, publicly known microRNAs that have been accessioned by others into miRBase (http://microrna.sanger.ac.uk/; see Griffiths-Jones S. et al. (2007) Nucl. Acids Res. 36:154-158). These latter probes are designated by either “mir” or “let.”

[0040] Tables 27 and 28, below, list hybridization probes that have been found to be complementary to, and hybridize with, target RNAs that were detected at elevated levels in certain lung cancer cell lines (see Example 5). Certain probes listed in Tables 27 and 28 are complementary to, and hybridize with, novel target RNA species that are expressed in human cells. Other probes in Tables 27 and 28 are complementary to, and hybridize with, publicly known microRNAs that have been accessioned by others into miRBase (http://microrna.sanger.ac.uk/; see Griffiths-Jones S. et al. (2007) Nucl. Acids Res. 36:154-158). These latter probes are designated by either “mir” or “let.”

[0041] Table 30, below, lists hybridization probes that have been found to be complementary to, and hybridize with, target RNAs that were detected at reduced levels in certain lung cancer cell lines (see Example 5). Certain probes listed in Table 30 are complementary to, and hybridize with, novel target RNA species that are expressed in human cells. Other probes in Table 30 are complementary to, and hybridize with, publicly known microRNAs that have been accessioned by others into miRBase (http://microrna.sanger.ac.uk/; see Griffiths-Jones S. et al. (2007) Nucl. Acids Res. 36:154-158). These latter probes are designated by either “mir” or “let.”

[0042] In Tables 1 and 2, respectively, the expression levels of target RNAs measured for each of the identified primary tumors, and for each of the identified cell lines, are expressed as fold-changes in expression relative to expression levels measured in normal human lung total RNA (see Examples 1 and 2). Similarly, in Tables 18 to 21, 23, 24, 27, 28, and 30, the expression levels of target RNAs measured for each of the identified primary tumors, and for each of the identified cell lines, are expressed as fold-changes in expression relative to expression levels measured in normal human lung total RNA (see Examples 4 and 5).

[0043] Table 6 lists target RNAs from Table 1 that are present at increased levels in NSCLCs. Table 7 lists target RNAs that are more frequently present at elevated levels in squamous cell carcinoma. In some embodiments, a method comprises detecting an elevated level of at least one target RNA from Table 7. In some such embodiments, detection of an elevated level of at least one target RNA from Table 7 is indicative of squamous cell carcinoma. Table 8 lists target RNAs that are more frequently present at elevated levels in adenocarcinoma. In some embodiments, a method comprises detecting an elevated level of at least one target RNA from Table 8. In some such embodiments, detection of an elevated level of at least one target RNA from Table 8 is indicative of adenocarcinoma. Table 9 lists target RNAs that are present at increased levels in aggressive forms of lung cancer. In some embodiments, a method comprises detecting an elevated level of at least one target RNA from Table 9. In some such embodiments, detection of an elevated level of at least one target RNA from Table 9 is indicative of an aggressive form of lung cancer.

[0044] In some embodiments, a method comprises detecting multiple isomirs with a single probe. Detection of an elevated level of one or multiple isomirs is considered to be indicative of lung cancer. When multiple microRNAs having the same sequence but are expressed from different genes, one or more of the genes may be upregulated in a lung cancer patient. Detection of a microRNA expressed from any one of the genes is considered to be indicative of lung cancer.

[0045] For convenience of reference herein, and not by way of limitation, some “target RNA” species are denominated “microRNAs” in the tables set forth herein and Example 1. In some embodiments, the target RNA is a single mature microRNA capable of specifically hybridizing to a hybridization probe set forth in any of Tables 1, 2, 6 to 9, 18, 20, 23, 27, 28, 30, and 32 to 34. In some embodiments, a target RNA is a single mature microRNA that comprises a sequence that is complementary to at least 15 contiguous nucleotides of a sequence selected from SEQ ID NO.: 1 to 397, 1063 to 1210, 1363 to 1707, 2064 to 2183, 2312 to 2452, 2673 to 2680, and 2689. In some embodiments, a target RNA is a single mature microRNA that comprises at least 15 contiguous nucleotides of a sequence selected from SEQ ID NOs: 794 to 1043, 2576 to 2672, and 2692. In some embodiments, target RNA may include a plurality of target RNAs, all of which are capable of specifically hybridizing to a single complementary probe sequence (for example, when two or more target microRNAs are isomirs). In some embodiments, the so-denominated “microRNA” is one or more RNA species capable of specifically hybridizing to the respective hybridization probe, such that one or more target RNAs do not meet canonical definitions for mature microRNAs. In some embodiments, a target RNA is an mRNA. In some embodiments, the “target RNA” is a piwi-interacting RNA (piRNA), i.e., a small RNA expressed in animal cells that is distinct in size (26-31 nt) from microRNA and that forms distinct complexes with Piwi proteins that are involved in transcriptional gene silencing.

[0046] Mature human microRNAs are typically composed of 17 to 27 contiguous ribonucleotides, and often are from 19 to 25 nucleotides in length, or 21 or 22 nucleotides in length. The sequences of some target microRNAs that can be detected in accordance with the present disclosure can be found within the pre-microRNA sequences shown in Tables 3, 22, 25, 29, 31, and 37 (SEQ ID NOs: 398 to 793, 1211 to 1362, 1708 to 2063, 2184 to 2311, 2453 to 2575, and 2681 to 2688, 2690, and 2691). In some embodiments, more than one mature target RNA is derived from a single pre-microRNA shown in Tables 3, 22, 25, 29, 31, and 37. The sequences of some publicly known mature microRNAs are shown below in Tables 4 and 5 (SEQ ID NOs: 794 to 1043, and 2692). Further, in some embodiments, a microRNA comprises at least 10, at least 11, at least 12, at least 13, at least 14, at least 15, at least 16, at least 17, at least 18, at least 19, at least 20, at least 21, at least 22, at least 23, at least 24, at least 25, or at least 26 contiguous nucleotides of a sequence in Table 38 (SEQ ID NOs: 2576 to 2672).

[0047] While not intending to be bound by theory, mammalian microRNAs mature as described herein. A gene coding for a microRNA is transcribed, leading to production of a microRNA precursor known as the “pri-microRNA” or “pri-miRNA.” The pri-miRNA can be part of a polycistronic RNA comprising multiple pri-miRNAs. In some circumstances, the pri-miRNA forms a hairpin with a stem and loop, which may comprise mismatched bases. The hairpin structure of the pri-miRNA is recognized by Drosha, which is an RNase III endonuclease protein. Drosha can recognize terminal loops in the pri-miRNA and cleave approximately two helical turns into the stem to produce a 60-70 nucleotide precursor known as the “pre-microRNA” or “pre-miRNA.” Drosha can cleave the pri-miRNA with a staggered cut typical of RNase III endonucleases yielding a pre-miRNA stem loop with a 5′ phosphate and an approximately 2-nucleotide 3′ overhang. Approximately one helical turn of the stem (about 10 nucleotides) extending beyond the Drosha cleavage site can be essential for efficient processing. The pre-miRNA is subsequently actively transported from the nucleus to the cytoplasm by Ran-GTP and the export receptor Exportin-5.

[0048] The pre-miRNA can be recognized by Dicer, another RNase III endonuclease. In some circumstances, Dicer recognizes the double-stranded stem of the pre-miRNA. Dicer may also recognize the 5′ phosphate and 3′ overhang at the base of the stem loop. Dicer may cleave off the terminal loop two helical turns away from the base of the stem loop leaving an additional 5′ phosphate and an approximately 2-nucleotide 3′ overhang. The resulting siRNA-like duplex, which may comprise mismatches, comprises the mature microRNA and a similar-sized fragment known as the microRNA*. The microRNA and microRNA* may be derived from opposing arms of the pri-miRNA and pre-miRNA. The mature microRNA is then loaded into the RNA-induced silencing complex (“RISC”), a ribonucleoprotein complex. In some cases, the microRNA* also has gene silencing or other activity.

[0049] It is understood that where a sequence includes thymine (T) bases, a target RNA may contain uracil (U) bases instead.

TABLE 1

| Array | | probe | fold-changes in primary tumors vs. normal Lung | | | | | | | | | |
|---|---|---|---|---|---|---|---|---|---|---|---|---|
| probe | Array probe sequence (5′ to 3′, without linker) | SEQ ID NO: | Epi4 | Epi7 | Epi5 | Adk1 | Adk3 | Adk11 | Adk8 | Adk9 | Adk2 | Adk10 |
| 266-R4-1 | GTCGCCCCCTCCCCCAAGTTGAGACTTGCAGCTAC | 1 | 7.33 | 1.43 | 1.97 | 3.81 | −3.74 | −2.28 | −3.72 | −1.19 | −11.61 | −2.38 |
| 673-L4-1 | GCTCCCCTCACTGTGAACTTTTCACCCAGCTAACCTGC | 2 | 3.55 | 1.45 | −1.26 | 1.44 | (nd) | −2.70 | −5.73 | −1.21 | −6.23 | −4.03 |
| | TCCTCAC | | | | | | <−6.23 | | | | | |
| 836-R4-1 | AAATAATCATTCCAAATGGTTCTCCCTGCTATGATTCAC | 3 | 6.78 | 1.06 | (nd) | 2.23 | −1.23 | −2.34 | −3.54 | −1.02 | −6.03 | −1.43 |
| | | | | | <−6.03 | | | | | | | |
| 3249-L4-1 | GCGGAGCCGCCGCCATCCCCGGAGCCGCCGCCGCCG | 4 | 1.46 | 1.91 | 2.34 | −1.38 | −2.37 | −3.34 | −3.73 | −2.89 | −6.52 | −2.00 |
| | CCGCC | | | | | | | | | | | |
| 3371-L4-1 | TTTCCTTTCCTCCCCTCCACACCCCATGACTCCCCACA | 5 | 7.78 | 1.44 | (nd) | 3.28 | (nd) | −1.54 | −2.45 | −1.89 | (nd) | −1.75 |
| | CTTGAG | | | | <−3.63 | | <−3.63 | | | | <−3.63 | |
| 3717-L2-1 | CCGCCCTCCCCATAGCCTCACCCCAAACCCACTCACA | 6 | 5.45 | −1.46 | 2.40 | 2.66 | −3.24 | −3.42 | −6.97 | −22.96 | −22.96 | −2.75 |
| 3799-R3-1 | CCAGAGGCCCCCCGCCGGCC | 7 | 4.81 | 1.62 | 1.19 | 3.07 | −4.42 | −2.84 | −5.33 | −1.46 | −18.87 | −2.91 |
| 3872-L1-1 | TCATTTTCTTGTCTTCTTCCCTTATGCAC | 8 | >6.17 | nd | nd | >2.09 | nd | nd | nd | nd | nd | nd |
| 3875-R3-1 | CTCTCTCCCACTTTAATAA | 9 | >20.25 | nd | nd | >2.90 | nd | nd | nd | nd | nd | nd |
| 3897-R3-1 | CAGCCGCCTCCCCCTCAGCGTTAA | 10 | 5.07 | 1.62 | 1.80 | 1.97 | −3.20 | −3.17 | −4.86 | −1.07 | −2.38 | −1.89 |
| 3923-R3-1 | GCCTCTCACAAAGGATCTCCTTCATCCCTCTCC | 11 | 17.53 | 1.49 | (nd) | 4.86 | (nd) | 2.05 | −1.32 | (nd) | (nd) | −1.16 |
| | | | | | <−1.39 | | <−1.39 | | | <−1.39 | <−1.39 | |
| 3953-R3-2 | ACTCCAGCCTCCGCCGCCTCAGCTTCCCGAGC | 12 | 1.50 | 1.86 | 2.21 | 1.28 | −2.29 | −3.82 | −5.17 | nd G3 | nd G3 | −2.73 |
| 3995-L2-2 | CTATAAAACTTCGAAAAGTCCCTCCTCCTCACGT | 13 | 6.16 | 1.93 | 1.05 | 3.01 | −3.51 | −2.18 | −4.19 | 1.21 | −5.70 | −1.85 |
| 4026-R3-1 | GGCGAGAGAGAAAGCCCCCCT | 14 | 6.37 | −1.17 | 2.06 | 3.81 | −3.69 | −3.06 | −5.40 | −1.70 | −18.38 | −4.41 |
| 4037-R3-2 | GCCTGTTCCCTGGCATGTACTGTAATTTATCT | 15 | 6.57 | 1.44 | (nd) | 2.17 | (nd) | 2.17 | 2.34 | 2.64 | 6.81 | −1.06 |
| | | | | | <−1.28 | | <−1.28 | | | | | |
| 4143-R3-1 | TCAGCGTCTTGCTCTCCTCCTGGTA | 16 | >7.19 | nd | nd | >2.08 | nd | nd | nd | nd | nd | nd |
| 4203-R3-2 | GCACATTCCCACTTCCCCAGAGGCAGGCTCCATAT | 17 | >4.30 | nd | nd | nd | nd | nd | nd | nd | nd | nd |
| 4205-R3-2 | GCCCTACAACTTCATCCTCACCACTCACACCAC | 18 | >3.92 | nd | nd | >2.47 | nd | nd | nd | nd | nd | nd |
| 4303-R1-1 | AGTGCCCGCTCCTCCGACCTCCCTGCGCACC | 19 | 4.55 | 2.06 | 1.53 | 2.49 | −3.30 | −1.83 | −3.64 | −2.09 | −10.57 | −2.26 |
| 4315-R3-2 | TCCCCGGCCCTCTCCATTCTCGGCTCCGGAGCA | 20 | 5.42 | 1.69 | 1.44 | 2.31 | −2.65 | −2.17 | −2.74 | −1.64 | −4.81 | −1.87 |
| 4361-R3-1 | CGTCTCCCTCCCTCATGTGC | 21 | 13.35 | 3.46 | (nd) | 4.34 | (nd) | −1.41 | −1.74 | 2.20 | (nd) | 1.27 |
| | | | | | <−1.73 | | <−1.73 | | | | <−1.73 | |
| 4440-L3-2 | TTTGACATTCAGAGCACTGGGCAGAAATCACA | 22 | 6.02 | −1.51 | 1.14 | 1.60 | (nd) | −1.05 | −1.83 | −1.14 | 1.57 | −2.75 |
| | | | | | | | <−3.39 | | | | | |
| 4440-R3-2 | GTCATAGTTACTCCCGCCGTTTACCCGCATTTC | 23 | 9.42 | 1.72 | 1.53 | 3.52 | −3.11 | −1.63 | −3.21 | −1.13 | −1.70 | −2.72 |
| 4448-R3-1 | CCTACCCCCAGCATCTCCTCACGCCATTGCC | 24 | >2.43 | nd | nd | >1.62 | nd | nd | nd | nd | nd | nd |
| 4479-R3-1 | AGCCCCCTGCCCGGAAATTCAAAACAACTGC | 25 | 3.07 | 3.03 | −1.01 | 2.30 | −7.11 | −3.04 | −3.90 | −2.34 | −5.33 | −2.81 |
| 4593-R3-1 | AGCAGATGACATAACTCCCCCGGCATCAG | 26 | 8.31 | 2.80 | 1.23 | 1.93 | −4.73 | −2.65 | −5.00 | 1.79 | −9.77 | 1.20 |
| 4666-R4-1 | GCCGACTCCCCCCAACACCTGCGGGTGGCAC | 27 | 24.77 | 2.27 | 3.49 | 7.40 | −2.36 | −1.70 | −2.05 | 2.37 | −3.62 | −1.01 |
| 4790-L4-1 | AACCTGTCTCCCTCATTACTAGAATTCTGGG | 28 | >14.59 | >1.58 | nd | >4.07 | nd | nd | nd | nd | nd | nd |
| 4829-R2-1 | TCCCTTTGTGCTGCCCGAGTGCCTTCCCCCTG | 29 | 12.09 | 1.52 | 1.69 | 5.73 | −6.10 | −1.29 | −4.20 | −1.12 | −9.92 | −2.88 |
| 4855-R3-1 | GGGCTGCCGGGTCTCCCGCTTCC | 30 | 8.26 | 1.91 | 1.44 | 1.78 | −3.56 | −1.50 | −1.81 | 1.87 | −2.80 | 1.20 |
| 4875-R2-2 | CACAGCCCCTTCCTGTGACTTCACAC | 31 | 4.28 | −1.44 | 1.02 | 2.82 | (nd) | −2.46 | −5.03 | −1.17 | (nd) | −4.78 |
| | | | | | | | <−5.97 | | | | <−5.97 | |
| 4988-R4-1 | CTCCTCCTCCCCGTCTTTGGATACCAAACACTGGAC | 32 | 9.10 | 1.72 | 1.15 | 2.70 | (nd) | −2.04 | −2.34 | −1.34 | (nd) | −1.55 |
| | | | | | | | <−3.75 | | | | <−3.75 | |
| 5006-L3-1 | ACAGCTCCCTCTGCTGGCTCC | 33 | 6.58 | 1.11 | 2.00 | 5.46 | (nd) | (nd) | (nd) | (nd) | (nd) | (nd) |
| | | | | | | | <−1.43 | <−1.43 | <−1.43 | <−1.43 | <−1.43 | <−1.43 |
| 5080-R3-1 | CTTGCAAAGGGTCTCCTTCATCCCTCTCCA | 34 | 5.91 | −1.01 | −1.35 | 2.60 | (nd) | 1.28 | −1.87 | 1.18 | (nd) | −3.70 |
| | | | | | | | <−4.53 | | | | <−4.53 | |
| 5192-L3-2 | CATTTTTCCCCTTCCTTCCTCTATATCAGCAA | 35 | 1.54 | 1.24 | (nd) | 2.92 | (nd) | (nd) | −1.79 | 1.39 | (nd) | (nd) |
| | | | | | <−1.61 | | <−1.61 | <−1.61 | | | <−1.61 | <−1.61 |
| 5342-L3-1 | CACCACCAAACCAAATGCCGCTGCTCTCCTTCCA | 36 | 1.95 | 1.46 | 2.07 | 1.19 | (nd) | −2.70 | −4.03 | −1.81 | (nd) | −1.99 |
| | | | | | | | <−4.91 | | | | <−4.91 | |
| 5521-L2-1 | GTCTTGGGTGGGCCCTCCCCAGAGCACACCCTCT | 37 | 4.19 | (nd) | 2.44 | 2.24 | (nd) | (nd) | (nd) | (nd) | (nd) | (nd) |
| | | | | <−1.44 | | | <−1.44 | <−1.44 | <−1.44 | <−1.44 | <−1.44 | <−1.44 |
| 5554-R2-1 | CCCCACCCCCTCATCAGCTGCTCCCAGAT | 38 | 3.45 | 1.79 | 1.00 | 1.73 | (nd) | −2.78 | −2.03 | −1.57 | (nd) | −1.91 |
| | | | | | | | <−6.36 | | | | <−6.36 | |
| 5638-R2-1 | GGCCCTCCCCCTGCCTGTGATAGGCTGCTTG | 39 | 5.54 | −1.87 | 2.47 | 3.18 | −2.79 | −3.13 | −9.55 | 1.18 | −15.66 | −3.29 |
| 5640-L3-1 | GCCATGGAACACCGTGCCTGCCCCTCTCGAGA | 40 | 3.56 | 2.33 | 1.22 | 2.16 | −4.15 | −1.75 | −2.54 | −1.31 | −9.19 | −2.51 |
| 5726-L3-1 | TAATAAAATATCTTCTCACTGTGCCCTTG | 41 | >8.13 | nd | nd | >1.83 | nd | nd | nd | nd | nd | nd |
| 5782-L3-1 | GATTCCAGCCCCTTCCCCC | 42 | 6.87 | 1.80 | 1.13 | 3.16 | (nd) | −1.78 | −3.13 | (nd) | (nd) | −2.66 |
| | | | | | | | <−3.21 | | | <−3.21 | <−3.21 | |
| 5795-R1-1 | CTGCCCTCCAAGAAATAAATTACCCGCAATTACT | 43 | 3.41 | 1.05 | 1.52 | 2.16 | (nd) | (nd) | (nd) | (nd) | (nd) | (nd) |
| | | | | | | | <−2.02 | <−2.02 | <−2.02 | <−2.02 | <−2.02 | <−2.02 |
| 5836-R3-2 | CATTAACCCCCATTATCACAGCACGCCCCATTC | 44 | 13.99 | 1.99 | (nd) | 2.26 | (nd) | (nd) | (nd) | (nd) | (nd) | (nd) |
| | | | | | <−1.09 | | <−1.09 | <−1.09 | <−1.09 | <−1.09 | <−1.09 | <−1.09 |
| 5854-R3-1 | CCCTCCCTCTCCGAAAGAATGTGTCAC | 45 | 22.51 | −1.01 | 1.54 | 4.54 | (nd) | −1.03 | −2.56 | 5.86 | −1.93 | −1.08 |
| | | | | | | | <−4.11 | | | | | |
| 5971-R3-1 | CTGCTCAGCCTCCCACATCTGT | 46 | 5.67 | −1.01 | (nd) | 2.33 | (nd) | −1.08 | −1.64 | 2.13 | (nd) | −1.38 |
| | | | | | <−1.78 | | <−1.78 | | | | <−1.78 | |
| 6008-R1-1 | ACAATACCCCCACCTTTTTCCTGTACCTTAC | 47 | >3.56 | nd | nd | >2.06 | nd | nd | nd | nd | nd | nd |
| 6016-R2-1 | AAACTCCAGCAGCCCCGTCAGCCTCCTGCT | 48 | 4.31 | 1.91 | 1.65 | 2.09 | (nd) | (nd) | −2.58 | −1.41 | (nd) | −1.80 |
| | | | | | | | <−2.53 | <−2.53 | | | <−2.53 | |
| 6037-R3-2 | GCAATTCCCTTTCCTCCATCTCCAATTTTCCTC | 49 | 4.15 | −1.55 | 1.15 | 1.38 | (nd) | (nd) | (nd) | (nd) | (nd) | (nd) |
| | | | | | | | <−2.24 | <−2.24 | <−2.24 | <−2.24 | <−2.24 | <−2.24 |
| 6096-R3-1 | TGTTTTAATCCTGCCCCGT | 50 | 8.12 | 2.89 | 2.83 | 1.81 | (nd) | (nd) | (nd) | (nd) | (nd) | (nd) |
| | | | | | | | <−1.12 | <−1.12 | <−1.12 | <−1.12 | <−1.12 | <−1.12 |
| 6183-R3-1 | GATTCCACTTTTCTTAATGACTTTCCCCTCCT | 51 | >2.90 | nd | nd | >3.58 | nd | nd | nd | nd | nd | >1.17 |
| 6192-L3-1 | AGATAAAAAACCACCCACCCAGCAC | 52 | 6.12 | 1.20 | (nd) | 1.36 | (nd) | −1.17 | −3.42 | (nd) | (nd) | (nd) |
| | | | | | <−3.75 | | <−3.75 | | | <−3.75 | <−3.75 | <−3.75 |
| 6233-L3-1 | AAAATTAGATTTCCACTTTATCCTTCTCCC | 53 | >15.87 | nd | nd | >4.27 | nd | nd | nd | >2.53 | nd | nd |
| 6235-R3-1 | GCTCCAAAAATCCATTTAATATATTGTCCTT | 54 | 7.85 | 1.15 | −2.40 | 2.29 | −6.59 | −2.77 | −3.73 | −1.08 | −12.11 | −2.01 |
| 6287-L3-2 | GCCCCGCCCCACCTTTCGGGGCTCACCTGGC | 55 | 5.41 | 2.01 | 1.64 | 3.04 | (nd) | −2.07 | −2.75 | (nd) | (nd) | −2.87 |
| | | | | | | | <−3.75 | | | <−3.75 | <−3.75 | |
| 6409-L3-1 | CGTTCCCAACCGCACGCGCCGCCTTCTGGAAC | 56 | 2.22 | 1.37 | 2.40 | 1.28 | −2.50 | −3.09 | −5.39 | −2.53 | −6.45 | −2.76 |
| 6434-R3-1 | AGCCCTCCCACCAGCCAGCTGCAGTGC | 57 | 2.54 | −1.65 | 1.71 | 2.49 | −3.08 | −2.94 | −6.08 | −3.25 | −44.90 | −7.25 |
| 6484-R3-2 | CGCTTCGGGATCCTCTCCAACTGCAACCACA | 58 | >6.42 | nd | >2.40 | >4.37 | nd | nd | nd | nd | nd | nd |
| 6490-R4-1 | CCCATCCCCCATATGACGCTTCCCCCTCCTAACCTCAC | 59 | 3.28 | 1.04 | 1.30 | 2.00 | −4.20 | −3.75 | −5.00 | −2.07 | −7.58 | −2.49 |
| | CACCCCCAGCA | | | | | | | | | | | |
| 6496-R3-1 | CCCCTCCCCCACCCACCACTTCCCCTAGAGTCC | 60 | 14.40 | 1.47 | 1.69 | 4.18 | −3.34 | −2.65 | −2.54 | −2.65 | −5.20 | −1.59 |
| 6584-L1-1 | TCGGCCCTGCCTCCTCCTCCT | 61 | 8.46 | 1.93 | 1.09 | 2.11 | (nd) | (nd) | (nd) | (nd) | (nd) | −1.50 |
| | | | | | | | <−2.02 | <−2.02 | <−2.02 | <−2.02 | <−2.02 | |
| 6602-R3-2 | AGAGCCCCAGTGGAAATCTCTCCTCCAAATCCAT | 62 | >4.95 | nd | nd | >1.86 | nd | nd | nd | nd | nd | nd |
| 6642-R3-1 | CACGTCCTCCCCTCCCCTCGAGGTGTCACACA | 63 | 5.93 | 1.20 | (nd) | 2.84 | (nd) | −2.73 | −3.47 | −1.15 | (nd) | −2.02 |
| | | | | | <−5.26 | | <−5.26 | | | | <−5.26 | |
| 6681-R2-1 | CCTGTTTTCTCCCCTCTCTCTCTGCCCCTCC | 64 | 6.76 | 2.18 | 1.13 | 3.85 | (nd) | −1.90 | −2.74 | −1.12 | (nd) | −1.77 |
| | | | | | | | <−6.34 | | | | <−6.34 | |
| 6683-R3-1 | AAAATAAACTCTTCCTGCTCAAG | 65 | >10.55 | >1.57 | nd | >4.34 | nd | nd | nd | nd | nd | nd |
| 6752-R1-1 | CCCTCCTTTCCCCACCTCAGT | 66 | 14.74 | 1.34 | (nd) | 4.34 | (nd) | (nd) | (nd) | (nd) | (nd) | (nd) |
| | | | | | <−1.39 | | <−1.39 | <−1.39 | <−1.39 | <−1.39 | <−1.39 | <−1.39 |
| 6795-R4-1 | CTTCCCGAGGCCACATGCTTCTTTATATCCCCATA | 67 | >11.94 | nd | nd | >1.62 | nd | >1.60 | nd | nd | nd | nd |
| 6803-R3-1 | GCTCCCTCTCTGGTTGGACCTCACCCAAAGAT | 68 | 19.16 | 1.39 | 1.71 | 4.21 | (nd) | −1.08 | −3.03 | 1.87 | (nd) | −1.90 |
| | | | | | | | <−4.36 | | | | <−4.36 | |
| 6839-L3-1 | GCCCGCTGGGCCCTGCCACCCCCACCCCT | 69 | 1.71 | 1.71 | 1.97 | 1.77 | (nd) | −3.04 | −3.58 | −2.14 | (nd) | −2.36 |
| | | | | | | | <−6.04 | | | | <−6.04 | |
| 6880-L3-2 | ACCTCCCCCGCGAAGACATCCACATTCTGCA | 70 | 7.16 | 1.64 | 1.21 | 3.97 | −4.57 | −2.33 | −3.69 | 1.35 | −12.07 | −1.50 |
| 6906-L3-1 | GTGTCTTCTCCCCAACCAGCCAGCTCTCCTGG | 71 | >7.07 | nd | nd | >2.10 | nd | nd | nd | nd | nd | nd |
| 6930-R3-1 | ATTAATCCTTCTCTCCCCTCTG | 72 | 34.08 | 2.60 | 2.04 | 9.78 | (nd) | (nd) | (nd) | 2.54 | (nd) | 1.50 |
| | | | | | | | <−1.68 | <−1.68 | <−1.68 | | <−1.68 | |
| 6984-R4-1 | CCCCCTGCCCAAGCATTTGCTTGGGCACCAAAGTCCCT | 73 | 17.80 | 2.11 | 2.35 | 4.74 | (nd) | (nd) | (nd) | 1.69 | (nd) | (nd) |
| | GCAA | | | | | | <−1.93 | <−1.93 | <−1.93 | | <−1.93 | <−1.93 |
| 7026-L3-2 | CCTGATCGAAAACCTCACCCACCAGATCCGGG | 74 | 4.22 | 2.58 | (nd) | 1.21 | (nd) | (nd) | −1.35 | (nd) | (nd) | (nd) |
| | | | | | <−1.59 | | <−1.59 | <−1.59 | | <−1.59 | <−1.59 | <−1.59 |
| 7061-R3-1 | ATGGAAACCCCACCCTTCCC | 75 | 3.76 | 2.16 | −1.23 | −1.09 | −4.11 | −2.69 | −1.66 | −1.31 | −9.30 | −1.73 |
| 7066-R4-1 | CAAGGCCCGTAGCCTGAAAAAAGATGCCCCCACCAGC | 76 | 2.80 | 1.32 | 1.45 | 1.90 | (nd) | −4.34 | −4.43 | −3.00 | (nd) | −3.99 |
| | CCTGCC | | | | | | <−7.42 | | | | <−7.42 | |
| 7126-L3-1 | GCACACCCGCTCTCCGGCCCGCGCCCCTG | 77 | 4.39 | 2.59 | 1.54 | 1.19 | −3.23 | −2.33 | −3.21 | −1.99 | −3.87 | −2.12 |
| 7182-L4-1 | TCTGGGTAACTAGCCGTTTCCGTCACCTTCCCCTGCCC | 78 | 8.66 | 1.60 | (nd) | 3.08 | (nd) | −2.00 | −2.46 | −1.11 | −1.39 | −1.82 |
| | CC | | | | <−7.09 | | <−7.09 | | | | | |
| 7192-R4-1 | GCAAAGCACTTCCCCCTCTAAGTCTGCCTGGGCTCTTG | 79 | 5.65 | 1.06 | 1.60 | 3.31 | (nd) | (nd) | −2.07 | 1.24 | (nd) | −1.76 |
| | GCAC | | | | | | <−2.01 | <−2.01 | | | <−2.01 | |
| 7292-L3-2 | TAAATAGCTTCTGAACCTCCCTGCATTCTAATTGC | 80 | 6.77 | 1.34 | 1.45 | 3.96 | (nd) | (nd) | (nd) | 1.41 | (nd) | (nd) |
| | | | | | | | <−1.55 | <−1.55 | <−1.55 | | <−1.55 | <−1.55 |
| 7352-R3-2 | GCCCCTGCCAGAATCCTCTAACAGCTCTAATTGG | 81 | 2.28 | 2.91 | (nd) | 1.79 | (nd) | −2.74 | −3.58 | −1.97 | (nd) | −2.31 |
| | | | | | <−5.74 | | <−5.74 | | | | <−5.74 | |
| 7356-L2-1 | ACCGCGACATAGCCTCGCCCCC | 82 | 5.16 | 2.76 | 1.18 | 2.46 | (nd) | −1.64 | −3.10 | −1.59 | (nd) | −1.82 |
| | | | | | | | <−3.81 | | | | <−3.81 | |
| 7356-R2-1 | GAAGCTCCGCGGCGACGTCCCGTTACTCC | 83 | >15.13 | nd | nd | >1.62 | nd | nd | nd | nd | nd | nd |
| 7367-L1-1 | AGGGTTAGAGCTGCCCCCTCTGGGGACCG | 84 | 2.18 | −1.94 | −1.30 | 1.62 | (nd) | (nd) | −3.23 | (nd) | (nd) | −1.80 |
| | | | | | | | <−3.55 | <−3.55 | | <−3.55 | <−3.55 | |
| 7384-R3-1 | CTCGCAAAGGATCTCCTTCATCCCTCCCCA | 85 | 6.05 | 1.05 | 2.67 | 3.02 | (nd) | −1.86 | (nd) | 1.20 | (nd) | −1.32 |
| | | | | | | | <−2.34 | | <−2.34 | | <−2.34 | |
| 7411-R3-2 | AGTCCCCTGCCTCATCTGCCACCCCTAATGAC | 86 | 2.46 | 2.81 | −1.22 | 1.74 | (nd) | −2.99 | −3.82 | −1.84 | (nd) | −2.12 |
| | | | | | | | <−5.03 | | | | <−5.03 | |
| 7421-R2-1 | TAAAGAGACTTCCTCCACTGCCAGAGATCT | 87 | 3.81 | (nd) | (nd) | 3.90 | (nd) | (nd) | (nd) | (nd) | (nd) | (nd) |
| | | | | <−1.11 | <−1.11 | | <−1.11 | <−1.11 | <−1.11 | <−1.11 | <−1.11 | <−1.11 |
| 7426-L3-1 | TGGGAGACGAACACCTCCTGCTGTGCTTG | 88 | >6.19 | nd | nd | >3.67 | nd | nd | nd | >2.02 | nd | nd |
| 7569-L3-1 | TCAGGCCACAAAGCTACCCCCAAGACAGGCC | 89 | 1.43 | 1.15 | −1.03 | −1.03 | (nd) | (nd) | (nd) | (nd) | (nd) | (nd) |
| | | | | | | | <−3.88 | <−3.88 | <−3.88 | <−3.88 | <−3.88 | <−3.88 |
| 7571-L1-1 | AGGGCTCCCCCACCCCTAAG | 90 | 2.27 | −1.15 | −1.09 | 1.24 | −8.82 | −5.67 | −5.94 | −2.92 | −13.36 | −3.96 |
| 7572-R2-1 | ATCACCCTTCCCCCTCCCAAATAAAG | 91 | 11.01 | 1.19 | 1.42 | 4.86 | (nd) | −2.48 | −3.89 | −1.79 | (nd) | −1.63 |
| | | | | | | | <−4.50 | | | | <−4.50 | |
| 7578-L3-1 | CGCAGTGCACACCCTGAGCTACAGCCCCTC | 92 | −1.03 | −1.06 | −2.38 | −1.25 | −14.04 | −6.24 | −17.14 | −2.93 | −6.73 | −2.44 |
| 7660-L2-1 | CCCGGCCTCCGCCTGGCCCGAGCGATAA | 93 | 3.94 | 2.11 | 2.13 | 1.41 | (nd) | (nd) | −3.26 | −1.11 | (nd) | −1.77 |
| | | | | | | | <−3.09 | <−3.09 | | | <−3.09 | |
| 7702-L2-1 | CCCAGAGAACCGGAATTCCTCCCCGCCCC | 94 | 6.99 | 2.64 | 3.18 | 3.26 | (nd) | −1.95 | −2.34 | −1.20 | (nd) | −1.44 |
| | | | | | | | <−3.36 | | | | <−3.36 | |
| 7726-R3-2 | CATCCCTCTCCAGAAGAGGAGAAGAGGAAACA | 95 | 4.39 | −1.31 | (nd) | 2.45 | (nd) | 1.32 | −1.96 | −1.06 | (nd) | (nd) |
| | | | | | <−3.13 | | <−3.13 | | | | <−3.13 | <−3.13 |
| 7764-R3-2 | CCCTCTCTGCCTCTCTCATCACCAATAACAGAC | 96 | 9.88 | 1.35 | 1.56 | 3.58 | (nd) | −1.06 | (nd) | 1.15 | (nd) | −1.46 |
| | | | | | | | <−1.65 | | <−1.65 | | <−1.65 | |
| 8004-R3-2 | GGAACTGCTTCTCCTTGCTCCAGTCATTGAAG | 97 | 6.92 | 1.21 | −2.65 | 3.26 | (nd) | −3.19 | −4.22 | (nd) | (nd) | −2.06 |
| | | | | | | | <−9.22 | | | <−9.22 | <−9.22 | |
| 8016-L3-1 | TCAGCGCAACAAGCCCCGCAGTCACCCCTCT | 98 | 4.04 | 2.25 | 1.06 | 1.40 | (nd) | −2.38 | −3.04 | −1.84 | (nd) | −2.39 |
| | | | | | | | <−4.39 | | | | <−4.39 | |
| 8077-R3-1 | CCATTCCCCACCCTCAGGTAGTAAAAATA | 99 | 4.61 | 2.89 | (nd) | 1.35 | (nd) | (nd) | −1.28 | 1.17 | (nd) | −1.04 |
| | | | | | <−1.93 | | <−1.93 | <−1.93 | | | <−1.93 | |
| 8169-L3-1 | AACAGAAATGATTATTTACCTCCCCACATG | 100 | 8.55 | 1.42 | 1.85 | 5.76 | (nd) | (nd) | (nd) | 1.97 | (nd) | −1.39 |
| | | | | | | | <−1.59 | <−1.59 | <−1.59 | | <−1.59 | |
| 8250-R3-1 | CAGCCGCCTCTCCCTCAGCGTTAA | 101 | 7.73 | 1.48 | 1.79 | 2.25 | −2.24 | −3.20 | −5.50 | 1.35 | −1.23 | −1.26 |
| 8263-R3-1 | GATTAAAAACAAGAATCTATCTTCCCCCAGT | 102 | >4.54 | nd | nd | >1.78 | nd | nd | nd | nd | nd | nd |
| 8281-L3-1 | AGCCCCTCCCCAGCTGCAGCTGAGGGCTGG | 103 | 2.72 | −1.03 | 1.97 | 3.10 | −3.22 | −2.88 | −5.10 | −2.09 | −19.58 | −4.66 |
| 8316-R3-1 | ATCAGGGTATCCTCTCCCCA | 104 | >39.96 | nd | nd | >7.56 | nd | nd | nd | >2.43 | nd | nd |
| 8394-L3-1 | CCCCCGCCCTGCCCATCTCCGACT | 105 | 3.70 | 2.46 | 1.62 | 2.36 | −4.53 | −3.13 | −3.91 | −2.65 | −14.49 | −2.52 |
| 8433-L3-1 | AAATGGCTCCTTTCCCCTTTCCCTCCACCG | 106 | 11.25 | 1.11 | 1.90 | 4.23 | (nd) | −1.64 | −2.20 | 1.18 | (nd) | −1.36 |
| | | | | | | | <−2.16 | | | | <−2.16 | |
| 8564-L3-1 | CCCTTCACCCCAGTTGCCAAACA | 107 | >12.45 | nd | nd | >3.14 | nd | nd | nd | nd | nd | nd |
| 8587-R2-2 | CCCGGCGCCCCTCGCCGGCTCCAAACTTTCCCCAA | 108 | 3.02 | 1.99 | 1.87 | 2.01 | (nd) | (nd) | −3.33 | (nd) | (nd) | −1.53 |
| | | | | | | | <−3.01 | <−3.01 | | <−3.01 | <−3.01 | |
| 8724-R3-1 | GCCAAGCTTGGAACCTCTCCCTGCCAGCATCAC | 109 | 16.37 | 1.40 | 1.47 | 5.34 | (nd) | (nd) | (nd) | 1.87 | (nd) | −1.00 |
| | | | | | | | <−1.51 | <−1.51 | <−1.51 | | <−1.51 | |
| 8731-R3-1 | TCATTCATGCCCCATCCTGCCAG | 110 | 3.79 | 3.51 | (nd) | 3.09 | (nd) | (nd) | (nd) | (nd) | (nd) | (nd) |
| | | | | | <−1.34 | | <−1.34 | <−1.34 | <−1.34 | <−1.34 | <−1.34 | <−1.34 |
| 8808-R3-1 | CCAAAGACCCCTTTCTCCCAGCCTGTTTCTGCAA | 111 | 15.38 | (nd) | 1.74 | 3.85 | (nd) | (nd) | (nd) | 1.65 | (nd) | −1.15 |
| | | | | <−1.38 | | | <−1.38 | <−1.38 | <−1.38 | | <−1.38 | |
| 8898-R3-1 | CGGACGCCCGCTCCCGCCA | 112 | 4.61 | 2.99 | 2.21 | 2.39 | −3.44 | −2.32 | −3.50 | −1.73 | −8.22 | −2.57 |
| 9021-L4-1 | AAACAAACACCCAAGCTCCCCACACCATC | 113 | 4.79 | 1.54 | −1.06 | 1.48 | (nd) | (nd) | −3.04 | −1.15 | (nd) | (nd) |
| | | | | | | | <−3.02 | <−3.02 | | | <−3.02 | <−3.02 |
| 9053-R3-1 | TTCTTGCCCTCCAATCCCCGGGCTCCACCAGCC | 114 | 2.98 | 1.64 | −1.13 | 1.16 | −3.72 | −2.19 | −3.05 | −1.88 | −8.27 | −2.12 |
| 9068-R2-1 | CTGCCCTCCCTCTTGATCAAGACTGCTCTCCTAA | 115 | 3.42 | −1.69 | 2.79 | 2.64 | −2.57 | −3.10 | −11.82 | −1.57 | −40.43 | −4.16 |
| 9087-L4-1 | GGAAAAGAAACCCTCCCAGTCCATTCCCTTCCT | 116 | 2.03 | −2.72 | 1.81 | 1.31 | −2.99 | −3.69 | −4.84 | −1.39 | −9.51 | −2.38 |
| 9217-L3-1 | ACGATCCCCGCCGTGACTAAAGCCAACAGTGGA | 117 | 3.28 | 2.48 | 1.88 | 1.93 | (nd) | −2.32 | −3.01 | −1.46 | (nd) | −1.91 |
| | | | | | | | <−4.55 | | | | <−4.55 | |
| 9245-R2-1 | AACCTCTCATTAGCCAGCCACTCGCTCCCAAG | 118 | 5.25 | 4.01 | 1.82 | 1.83 | (nd) | (nd) | (nd) | (nd) | (nd) | (nd) |
| | | | | | | | <−1.69 | <−1.69 | <−1.69 | <−1.69 | <−1.69 | <−1.69 |
| 9287-L4-1 | GATATTCAGAGCCCTCCCCAGCCCACACATGC | 119 | 4.16 | −1.56 | 2.12 | 2.52 | −2.91 | −2.86 | −6.49 | −1.43 | −32.89 | −4.05 |
| 9347-L2-1 | GCCCAATATGCATTTTACATTTTAACAAAGA | 120 | >3.17 | nd | nd | >1.54 | nd | nd | nd | nd | nd | nd |
| 9349-R3-1 | GTGATGCAGAGGACTTCCTGCTCCAGGTCTC | 121 | 22.69 | 1.06 | (nd) | 7.70 | (nd) | (nd) | (nd) | (nd) | (nd) | (nd) |
| | | | | | <−1.13 | | <−1.13 | <−1.13 | <−1.13 | <−1.13 | <−1.13 | <−1.13 |
| 9387-R2-2 | TCCATCCTTGCCGTCGCCTTCATCTCAAAGCCATC | 122 | 2.28 | 1.28 | 2.25 | −1.06 | −2.17 | −3.48 | −4.42 | −2.26 | −4.76 | −1.91 |
| 9391-R3-1 | CAGCTGCCAGGGAGACATAGAAATTAAAAACAA | 123 | −1.34 | 1.31 | 1.27 | −1.69 | −1.57 | −1.49 | −2.45 | nd | nd | −1.82 |
| 9507-L3-2 | GTCTCCCTCATCCATCATCC | 124 | >8.07 | nd | nd | >3.35 | nd | nd | nd | nd | nd | nd |
| 9564-R1-1 | GCCGCCCGCCGGGCACCGGGCC | 125 | 1.64 | 1.84 | 2.11 | 1.01 | −2.74 | −3.42 | −4.08 | −2.21 | −7.78 | −2.50 |
| 9594-R2-1 | CTTAGACTTCCTTCCCACTCCCTGCAT | 126 | 11.20 | 1.01 | (nd) | 1.95 | (nd) | (nd) | (nd) | 2.21 | (nd) | −1.03 |
| | | | | | <−2.11 | | <−2.11 | <−2.11 | <−2.11 | | <−2.11 | |
| 9656-R3-1 | GCCCTTAAAGTACATACTGTGGAGATTAATGCT | 127 | >5.47 | nd | nd | >2.33 | nd | nd | nd | nd | nd | nd |
| 9691-L4-1 | AATCATCCATTTCATCCGCATCTCCCTCTTGGCCCCTTGC | 128 | 5.99 | 1.18 | 1.32 | 1.99 | (nd) | −1.97 | −2.87 | −1.57 | (nd) | −3.39 |
| | | | | | | | <−4.24 | | | | <−4.24 | |
| 9733-L3-1 | AAGGCTGTCCCTCACCAGACTTCCCCACCCCT | 129 | 7.61 | 3.56 | (nd) | 2.44 | (nd) | (nd) | 1.07 | 1.69 | (nd) | 1.33 |
| | | | | | <−1.48 | | <−1.48 | <−1.48 | | | <−1.48 | |
| 9774-R2-2 | CCGCCCCCTCACCGCCTCCTGCTCCCATCAGGC | 130 | 3.72 | 1.83 | 2.45 | 2.54 | −2.98 | −2.83 | −4.46 | −1.84 | −12.28 | −2.00 |
| 9816-R2-1 | CTGGCCCTTTAAGAGCCTCTCCGCGCGCTGCCG | 131 | 2.42 | 2.46 | 2.03 | 2.04 | −2.71 | −2.17 | −2.86 | −1.67 | −4.18 | −2.08 |
| 9840-L3-2 | TTCAGGTTTTTATAAATCAGGATGTCAACAAAT | 132 | −1.39 | 1.32 | 1.13 | −2.15 | −1.71 | −1.66 | −2.89 | nd | nd | −1.70 |
| 10010-R2-2 | CCCGGCGCCCCTCGCCGGCTCCAAACTTTCCCCAA | 133 | 4.99 | 2.90 | 2.53 | 3.23 | (nd) | (nd) | −1.85 | (nd) | (nd) | −1.31 |
| | | | | | | | <−1.75 | <−1.75 | | <−1.75 | <−1.75 | |
| 10030-R3-1 | AACTCAGCTGCCTTCCGCC | 134 | >6.94 | >1.63 | >3.55 | >2.08 | nd | nd | nd | nd | nd | nd |
| 10138-L2-1 | AGCCTGCTCCGCTCTCCCCTCCCACCAGAAAAAGT | 135 | 10.06 | 2.02 | 1.51 | 3.69 | −3.13 | −2.11 | −3.65 | 1.01 | −7.30 | −1.76 |
| 10145-L2-1 | CTTTGCTCTCTCTTCTGTTATCTGGACC | 136 | >5.20 | nd | nd | >1.95 | nd | nd | nd | nd | nd | nd |
| 10175-L1-1 | CCTGCTCCTAGCAACCAGGAGCCACAA | 137 | >7.31 | nd | nd | >4.44 | nd | nd | nd | nd | nd | nd |
| 10209-L3-1 | AGAAAATAAGTTAGCTATGTAACAAATTGA | 138 | −1.56 | 1.29 | −1.09 | −2.17 | −2.06 | −1.65 | −3.13 | nd | nd | −1.86 |
| 10231-L3-1 | GTGCAGCAGCCCGCGCCAGCCTCCGCAGCCGCC | 139 | 1.76 | 1.50 | 3.56 | −1.02 | −1.97 | −3.47 | −5.87 | −6.71 | −3.38 | −2.65 |
| 10231-R3-1 | TGAACTTTAGCTGGGCCGCCGCCTGTCAGC | 140 | 1.15 | 1.48 | 2.17 | −1.45 | −2.34 | −4.21 | −5.32 | −3.26 | −4.14 | −2.20 |
| 10242-R3-1 | GGAAGAAGCCCTTCCGCTTCCACCCCGAACAC | 141 | 5.35 | 2.89 | 1.21 | 3.14 | −2.60 | −1.56 | −3.46 | −1.09 | −6.84 | −2.88 |
| 10333-L3-1 | TGTGCCCTGCCCACCCCCTCCCCTGCCCCG | 142 | 5.80 | 1.70 | 1.74 | 2.93 | −3.43 | −2.75 | −4.34 | −2.25 | −9.80 | −2.32 |
| 10335-L3-1 | CACTCCCCTCCTTTTTAATTAGAAAGCACTAAGA | 143 | 10.97 | 1.56 | 2.36 | 6.06 | (nd) | (nd) | (nd) | (nd) | (nd) | −1.22 |
| | | | | | | | <−2.08 | <−2.08 | <−2.08 | <−2.08 | <−2.08 | |
| 10342-R2-2 | CCCGCCGCCGGAGCATCTCGAAGTTAATTAAA | 144 | 1.75 | 2.08 | 2.13 | −1.05 | −2.55 | −2.86 | −2.31 | −2.36 | −10.37 | −1.85 |
| 10366-R3-2 | AAACACCACCCACGCTCTTGCTACAAGACCCACAT | 145 | 2.46 | 1.21 | −1.12 | −1.11 | (nd) | −2.45 | −2.94 | (nd) | (nd) | (nd) |
| | | | | | | | <−3.19 | | | <−3.19 | <−3.19 | <−3.19 |
| 10374-R3-2 | GACACCGCCCGCTACTTTGTTAATGAAAAGCCCCC | 146 | 2.59 | 2.62 | 2.48 | 1.28 | −2.47 | −2.10 | −4.29 | nd | nd | −1.97 |
| 10533-R3-1 | GCCCCTTCTTTATATTGCCAAGA | 147 | 4.36 | (nd) | (nd) | 2.33 | (nd) | (nd) | (nd) | (nd) | (nd) | (nd) |
| | | | | <−1.58 | <−1.58 | | <−1.58 | <−1.58 | <−1.58 | <−1.58 | <−1.58 | <−1.58 |
| 11370-L4-1 | CCTCCGCCCCCACACTGCATCCTTGCCCAGTTTGGCTG | 148 | 7.22 | 1.56 | (nd) | 2.49 | −2.48 | −2.20 | −6.13 | −1.28 | −3.12 | −1.10 |
| | CCATCAGTATTGTCCCCTGAGAACTGGAC | | | | <−6.13 | | | | | | | |
| 12184-L4-1 | GACCTCAGCGTGCCCCCTTTCAACCACAGACGAATATT | 149 | 2.50 | 1.10 | −1.39 | 1.69 | (nd) | −2.20 | −3.80 | −1.92 | (nd) | −1.97 |
| | GTGTACAA | | | | | | <−4.07 | | | | <−4.07 | |
| 12223-L4-1 | CCCAGAAGACATCAGACAGAGTTGTTTCTTCTCCCTCTA | 150 | 1.99 | 1.06 | (nd) | 1.27 | (nd) | 1.25 | −1.49 | 1.03 | −2.26 | −3.14 |
| | | | | | <−4.89 | | <−4.89 | | | | | |
| 4315_C- | GCAGCCCCTCCTCCGAGAGGTTGGGGGTCGCGGCCG | 151 | −2.79 | 1.91 | 1.97 | 2.72 | −3.38 | −2.74 | −3.87 | −1.53 | −9.33 | −7.93 |
| L4-1 | CCCGGCCCTCCCGGTCCCCTCCCC | | | | | | | | | | | |
| 4315_D- | GGAAAGTCAGCCCCCAGCGCCCCCCGGAGTTCTTGG | 152 | 4.01 | 1.41 | 1.66 | 2.02 | −4.14 | −2.64 | −7.06 | −2.32 | −9.62 | −2.60 |
| R4-1 | | | | | | | | | | | | |
| 4315_E- | CCCCCACCAAACCTATTCCCGCATCCTCCCCGGCTCTGG | 153 | 7.07 | 1.72 | 1.30 | 2.47 | −4.50 | −2.77 | −5.04 | −2.24 | −10.19 | −2.01 |
| R4-1 | | | | | | | | | | | | |
| 4315_F- | AACCCGGGCTCCCCCACCCGCTCCCTGAGC | 154 | 3.58 | 1.70 | 1.23 | 1.44 | −5.04 | −3.19 | −3.15 | −2.24 | −20.64 | −2.42 |
| R4-1 | | | | | | | | | | | | |
| 4315_I-L4-1 | ACACCTCTGCGCCCCTCAGGCGCCCTGGGCCTCGGCG | 155 | 5.01 | 2.26 | 2.05 | 2.48 | −3.25 | −2.26 | −2.87 | −1.61 | −6.36 | −2.28 |
| | CCCCGCCCGTCCCAG | | | | | | | | | | | |
| 4315_K- | TCCCAGGGGGCCCTGAACTTGTCAAATCCTCGCCATCC | 156 | 4.24 | 1.87 | 2.15 | 1.72 | −3.72 | −2.41 | −4.85 | −1.91 | −6.99 | −1.83 |
| L4-1 | TCCACCCCCAGCCCCGG | | | | | | | | | | | |
| 10010_B- | GCCGAGCCCCCGCCCCCGCCGGGATGCTGCCCTCCG | 157 | 2.68 | 2.95 | 1.31 | 1.80 | −4.25 | −3.10 | −3.43 | −2.54 | −5.76 | −2.39 |
| L4-1 | GAAGGAGGGGCGCTGCCC | | | | | | | | | | | |
| 10010_D- | TGGCGCCCTCCCCCGCCCGGGGCTCAGCCTCTCACCTG | 158 | 4.06 | 1.62 | 1.93 | 2.59 | −3.56 | −2.99 | −4.26 | −1.54 | −15.24 | −2.37 |
| L4-1 | | | | | | | | | | | | |
| 7356_A- | CAGAGCCCGCTCTCGCGACCGACCTGCCGCCGACCGC | 159 | 1.71 | 1.65 | 3.03 | −1.13 | −1.99 | −3.31 | −4.25 | −3.28 | −3.88 | −2.82 |
| R4-1 | CACAG | | | | | | | | | | | |
| 12722-L4-1 | AATACGGACAAGCCCCACTCCCTCATTAGCATAAAAAA | 160 | 3.15 | 2.05 | 2.31 | 2.04 | −3.42 | −2.39 | −3.53 | −2.00 | −5.91 | −2.63 |
| | CAAAGTACTTCCGACCTCCCCGCCCGCCCGC | | | | | | | | | | | |
| 999999- | CCCCTTGTCACCCCCAGCCCCTTCCTGGCCAGGACCC | 161 | 10.71 | 2.08 | 1.97 | 3.33 | (nd) | −1.64 | −2.59 | 2.58 | (nd) | −1.53 |
| R4-1 | CAGCGAGGCCCAGAGAA | | | | | | <−2.88 | | | | <−2.88 | |
| 999997- | TCCTCACTGGGCCCCACCAAAACTGTGCCACCCCCTCA | 162 | 6.84 | −1.42 | 1.59 | 2.77 | −3.46 | −2.91 | −4.06 | −1.00 | −5.37 | −1.68 |
| R4-1 | AGCCCCCAGGAGCTTCCTTAAC | | | | | | | | | | | |
| 8433_B- | CATATTTTTGTGTTGCTGAGTATTTGGGGTTTGCTCGCC | 163 | >5.03 | >3.56 | >2.45 | >2.44 | nd | nd | nd | nd | nd | nd |
| L4-1 | CGT | | | | | | | | | | | |
| 8433_C- | AAACCAAAAAAAAAAAATTAAAAAGCGACGAAAATGCAA | 164 | 24.29 | 1.73 | 1.87 | 5.70 | (nd) | (nd) | (nd) | 1.95 | (nd) | 1.13 |
| R4-1 | TTGTGTGCCTTCTCCCTCC | | | | | | <−1.45 | <−1.45 | <−1.45 | | <−1.45 | |
| 8433_D- | CCCGAGCCCGGCGCCCTGTGTTGTGCTCCGCTCTCCG | 165 | 8.52 | 2.31 | 1.63 | 2.00 | (nd) | −1.76 | −3.76 | −1.33 | (nd) | −2.68 |
| R4-1 | GGAAATGCCATCACTAAT | | | | | | <−4.10 | | | | <−4.10 | |
| let-7a | AACTATACAACCTACTACCTCA | 166 | −5.65 | −1.33 | 1.33 | −2.81 | 1.20 | −1.63 | −1.75 | −1.18 | 1.20 | −3.59 |
| let-7b | AACCACACAACCTACTACCTCA | 167 | −2.30 | −1.30 | 1.41 | −2.86 | 1.19 | −1.79 | −2.26 | 1.05 | 1.51 | −4.67 |
| let-7c | AACCATACAACCTACTACCTCA | 168 | −2.52 | −1.34 | 1.39 | −2.93 | 1.22 | −1.77 | −1.97 | 1.17 | 1.38 | −3.51 |
| let-7d | AACTATGCAACCTACTACCTCT | 169 | −2.41 | −1.35 | 1.23 | −2.86 | −1.03 | −1.69 | −2.05 | 1.31 | 1.64 | −3.27 |
| let-7e | AACTATACAACCTCCTACCTCA | 170 | −2.38 | −1.32 | −1.20 | −2.76 | −1.49 | −1.83 | −5.03 | 1.11 | 1.34 | −8.91 |
| let-7f | AACTATACAATCTACTACCTCA | 171 | −3.05 | −1.28 | 1.19 | −3.04 | 1.01 | −1.73 | −4.92 | −1.20 | 1.06 | −3.85 |
| let-7g | AACTGTACAAACTACTACCTCA | 172 | −2.34 | −1.12 | 1.13 | −2.73 | −3.04 | −1.16 | −1.34 | 1.28 | 2.07 | −3.06 |
| let-7i | AACAGCACAAACTACTACCTCA | 173 | −1.56 | 1.86 | (nd) | −1.68 | 1.05 | 2.20 | −3.56 | 1.63 | 3.60 | −1.90 |
| | | | | | <−3.56 | | | | | | | |
| miR-100 | CACAAGTTCGGATCTACGGGTT | 174 | −1.91 | −1.56 | 1.24 | −3.21 | −1.72 | −2.50 | −2.63 | 1.39 | 2.17 | −5.22 |
| miR-1224- | CCACCTCCCGAGTCCTCAC | 175 | 5.56 | 1.51 | 1.89 | 1.57 | (nd) | (nd) | −1.11 | (nd) | (nd) | (nd) |
| 5p | | | | | | | <−1.14 | <−1.14 | | <−1.14 | <−1.14 | <−1.14 |
| miR-1225- | CCCCCCACTGGGCCGTACCCAC | 176 | 8.21 | −1.18 | 2.95 | 4.25 | (nd) | (nd) | −2.35 | (nd) | (nd) | (nd) |
| 5p | | | | | | | <−2.30 | <−2.30 | | <−2.30 | <−2.30 | <−2.30 |
| miR-1228* | CACACACCTGCCCCCGCCCAC | 177 | 3.27 | 3.43 | 1.06 | 1.96 | −6.69 | −3.06 | −3.39 | −1.87 | −12.52 | −2.10 |
| miR-125a- | TCACAGGTTAAAGGGTCTCAGGGA | 178 | (nd) | −1.52 | 1.28 | −3.29 | −2.87 | −1.81 | −6.80 | −1.99 | −1.10 | −6.52 |
| 5p | | | <−10.19 | | | | | | | | | |
| miR-125b | TCACAAGTTAGGGTCTCAGGGA | 179 | −3.83 | −1.52 | 1.33 | −3.15 | −1.08 | −1.77 | −2.46 | −1.78 | 1.01 | −5.55 |
| miR-126 | CGCATTATTACTCACGGTACGA | 180 | −2.39 | −1.40 | 5.58 | −2.14 | 1.33 | −1.45 | −1.81 | 1.07 | 1.71 | −1.42 |
| miR-135a* | CGCCACGGCTCCAATCCCTATA | 181 | >3.61 | nd | nd | 2.49 | nd | nd | nd | nd | nd | nd |
| miR-142- | TCCATAAAGTAGGAAACACTACA | 182 | −2.17 | 1.15 | 1.09 | −2.54 | −4.28 | 1.14 | 1.45 | −1.22 | 1.18 | −3.10 |
| 3p | | | | | | | | | | | | |
| miR-145 | AGGGATTCCTGGGAAAACTGGAC | 183 | −4.94 | −1.08 | 2.41 | −2.67 | 1.13 | 1.01 | −1.07 | −2.03 | 1.31 | −3.13 |
| miR-146b- | AGCCTATGGAATTCAGTTCTCA | 184 | (nd) | 1.12 | 2.44 | <−1.89 | <−1.89 | 2.71 | 1.07 | 1.30 | 2.48 | −1.21 |
| 5p | | | <−1.89 | | | | | | | | | |
| miR-149* | GCACAGCCCCCGTCCCTCCCT | 185 | 3.46 | 3.38 | −1.02 | 2.16 | −8.57 | −3.25 | −6.43 | −2.34 | −21.89 | −2.17 |
| miR-150* | CTGTCCCCCAGGCCTGTACCAG | 186 | >4.16 | nd | nd | >1.76 | nd | nd | nd | nd | nd | nd |
| miR-155 | ACCCCTATCACGATTAGCATTAA | 187 | nd | nd | nd | nd | nd | >1.83 | >1.07 | nd | nd | nd |
| miR-16 | CGCCAATATTTACGTGCTGCTA | 188 | −4.17 | −1.04 | (nd) | −3.62 | −1.53 | −1.05 | −1.04 | 1.73 | 2.03 | −3.14 |
| | | | | | <−10.19 | | | | | | | |
| miR-181c | ACTCACCGACAGGTTGAATGTT | 189 | (nd) | −1.73 | 1.58 | −2.37 | −1.79 | 1.13 | −2.25 | −1.16 | 1.07 | −3.23 |
| | | | <−3.23 | | | | | | | | | |
| miR-198 | GAACCTATCTCCCCTCTGGACC | 190 | >33.49 | >2.21 | nd | >8.74 | nd | nd | nd | nd | nd | nd |
| miR-199a- | TAACCAATGTGCAGACTACTGT | 191 | −3.52 | 1.40 | 1.43 | −1.94 | 1.72 | 1.56 | 1.33 | 1.59 | 2.97 | −4.20 |
| 3p | | | | | | | | | | | | |
| miR-19b | TCAGTTTTGCATGGATTTGCACA | 192 | −1.07 | −1.01 | 1.41 | −1.94 | (nd) | −1.10 | 1.48 | 1.28 | 4.82 | (nd) |
| | | | | | | | <−2.18 | | | | | <−2.18 |
| miR-200b | TCATCATTACCAGGCAGTATTA | 193 | 1.18 | 1.01 | (nd) | 1.43 | −1.58 | −1.56 | −1.38 | 1.72 | 2.60 | −1.45 |
| | | | | | <−5.45 | | | | | | | |
| miR-200c | TCCATCATTACCCGGCAGTATTA | 194 | 1.45 | 1.11 | −1.19 | 1.72 | −1.88 | −1.84 | −1.47 | 1.92 | 2.85 | −1.10 |
| miR-205 | CAGACTCCGGTGGAATGAAGGA | 195 | >11.24 | >24.11 | nd | nd | nd | nd | nd | >3.48 | >9.48 | nd |
| miR-21 | TCAACATCAGTCTGATAAGCTA | 196 | −2.52 | 1.77 | −1.51 | 1.45 | 1.41 | 3.51 | 2.27 | 3.43 | 5.38 | 1.25 |
| miR-23a | GGAAATCCCTGGCAATGTGAT | 197 | 1.38 | 2.90 | (nd) | 1.37 | (nd) | 2.28 | (nd) | 2.38 | 7.76 | −2.09 |
| | | | | | <−4.40 | | <−4.4 | | <−4.4 | | | |
| miR-23a* | AAATCCCATCCCCAGGAACCCC | 198 | >4.54 | nd | nd | >1.79 | nd | nd | nd | nd | nd | nd |
| miR-23b | GGTAATCCCTGGCAATGTGAT | 199 | −1.43 | 1.45 | (nd) | −1.34 | 1.26 | 1.24 | −2.02 | 1.27 | 4.35 | −1.98 |
| | | | | | <−9.07 | | | | | | | |
| miR-24 | CTGTTCCTGCTGAACTGAGCCA | 200 | −2.08 | 1.26 | 2.49 | −1.46 | 1.08 | 1.22 | −1.17 | 1.09 | 2.86 | −2.76 |
| miR-25* | CAATTGCCCAAGTCTCCGCCT | 201 | >4.17 | nd | nd | >1.38 | nd | nd | nd | nd | nd | nd |
| miR-26a | AGCCTATCCTGGATTACTTGAA | 202 | −2.98 | −1.73 | 2.04 | −3.66 | 1.04 | 1.00 | −1.33 | 1.07 | 1.67 | −2.29 |
| miR-26b | ACCTATCCTGAATTACTTGAA | 203 | −2.84 | −1.67 | 1.20 | −3.56 | −1.49 | −1.16 | −1.18 | 1.13 | 1.74 | −2.23 |
| miR-27a | GCGGAACTTAGCCACTGTGAA | 204 | −1.27 | 1.78 | 2.19 | −1.78 | −1.02 | 1.44 | 1.07 | 1.73 | 4.25 | −2.26 |
| miR-27b | GCAGAACTTAGCCACTGTGAA | 205 | −1.11 | 2.20 | 2.52 | −1.91 | 1.18 | 1.64 | 1.24 | 2.05 | 6.50 | −1.85 |
| miR-298 | TGGGAGAACCTCCCTGCTTCTGCT | 206 | 24.71 | 2.84 | (nd) | 10.70 | (nd) | (nd) | −1.15 | 2.09 | (nd) | 1.13 |
| | | | | | <−1.29 | | <−1.29 | <−1.29 | | | <−1.29 | |
| miR-29a | TAACCGATTTCAGATGGTGCTA | 207 | −2.68 | 1.00 | 3.18 | 1.50 | −1.90 | 2.13 | 1.41 | 1.23 | 2.18 | −2.96 |
| miR-29b | AACACTGATTTCAAATGGTGCTA | 208 | −5.79 | −1.32 | 1.33 | −1.17 | −3.06 | 1.46 | 1.26 | 1.01 | 1.30 | −5.30 |
| miR-29c* | TAACCGATTTCAAATGGTGCTA | 209 | −4.12 | −1.00 | 3.14 | 1.30 | −3.52 | 2.01 | 1.49 | 1.66 | 2.61 | −4.26 |
| miR-30a | CTTCCAGTCGAGGATGTTTACA | 210 | −4.44 | −3.14 | 3.50 | −3.84 | −1.50 | −2.18 | −3.97 | −7.98 | 2.09 | 1.23 |
| miR-30b | AGCTGAGTGTAGGATGTTTACA | 211 | (nd) | −1.98 | 2.09 | −4.38 | −2.50 | −1.73 | −2.27 | 2.12 | 2.77 | 1.03 |
| | | | <−6.56 | | | | | | | | | |
| miR-30b* | GAAGTAAACATCCACCTCCCAG | 212 | 3.38 | −1.21 | 1.05 | −1.36 | −2.31 | −2.53 | −2.76 | −1.56 | −3.51 | −3.51 |
| miR-30c | GCTGAGAGTGTAGGATGTTTACA | 213 | −4.45 | −2.14 | (nd) | (nd) | (nd) | −1.95 | (nd) | 1.86 | 2.21 | −2.40 |
| | | | | | <−6.05 | <−6.05 | <−6.05 | | <−6.05 | | | |
| miR-30c- | GGAGTAAACAACCCTCTCCCAG | 214 | 39.98 | (nd) | 1.57 | 7.84 | (nd) | (nd) | −1.42 | 2.67 | (nd) | (nd) |
| 1* | | | | <−1.58 | | | <−1.58 | <−1.58 | | | <−1.58 | <−1.58 |
| miR-30c-2 | GCTGAGAGTGTAGGATGTTTACA | 215 | −4.45 | −2.14 | (nd) | (nd) | (nd) | −1.95 | (nd) | 1.86 | 2.21 | −2.40 |
| | | | | | <−6.05 | <−6.05 | <−6.05 | | <−6.05 | | | |
| miR-30d | CTTCCAGTCGGGGATGTTTACA | 216 | −6.68 | −2.87 | 3.73 | −3.55 | −1.26 | −2.03 | −4.02 | 1.32 | 3.66 | 1.39 |
| miR-30e | CTTCCAGTCAAGGATGTTTACA | 217 | (nd) | −2.42 | 2.08 | (nd) | (nd) | −2.00 | (nd) | 1.45 | 1.71 | −1.30 |
| | | | <−4.99 | | | <−4.99 | <−4.99 | | <−4.99 | | | |
| miR-320a | TCGCCCTCTCAACCCAGCTTTT | 218 | 4.68 | 1.05 | 2.16 | 2.43 | 1.02 | 1.33 | −1.39 | nd | nd | −1.20 |
| miR-331- | TTCTAGGATAGGCCCAGGGGC | 219 | (nd) | (nd) | 2.17 | 1.42 | 1.24 | 1.47 | 1.27 | −1.21 | −1.21 | 1.36 |
| 3p | | | <−1.21 | <−1.21 | | | | | | | | |
| miR-371- | AGTGCCCCCACAGTTTGAGT | 220 | >2.65 | nd | nd | >1.30 | nd | nd | nd | nd | nd | nd |
| 5p | | | | | | | | | | | | |
| miR-373* | GGAAAGCGCCCCCATTTTGAGT | 221 | 10.21 | 1.72 | 2.16 | 3.92 | (nd) | −1.66 | −3.39 | 1.66 | (nd) | −1.73 |
| | | | | | | | <−3.77 | | | | <−3.77 | |
| miR-375 | TCACGCGAGCCGAACGAACAAA | 222 | nd | nd | nd | nd | nd | nd | nd | nd | nd | >2.88 |
| miR-423- | AAAGTCTCGCTCTCTGCCCCTCA | 223 | 6.96 | 1.49 | 1.63 | 1.87 | (nd) | −1.38 | −1.95 | 1.01 | −1.06 | −1.83 |
| 5p | | | | | | | <−6.09 | | | | | |
| miR-424 | TTCAAAACATGAATTGCTGCTG | 224 | nd | nd | nd | nd | nd | >2.14 | nd | >2.99 | >11.35 | nd |
| miR-483- | CTCCCTTCTTTCCTCCCGTCTT | 225 | 24.38 | 1.51 | 1.68 | 5.17 | (nd) | 1.11 | −1.64 | 3.19 | (nd) | −1.03 |
| 5p | | | | | | | <−1.54 | | | | <−1.54 | |
| miR-486- | ATCCTGTACTGAGCTGCCCCG | 226 | 3.44 | 2.92 | 2.61 | 1.43 | (nd) | (nd) | −1.85 | 1.05 | (nd) | (nd) |
| 3p | | | | | | | <−1.91 | <−1.91 | | | <−1.91 | <−1.91 |
| miR-491- | GTAGAAGGGAATCTTGCATAAG | 227 | −2.17 | 1.13 | 4.21 | −2.65 | (nd) | −1.40 | −3.03 | nd | nd | −3.87 |
| 3p | | | | | | | <−3.87 | | | | | |
| miR-491- | CCTCATGGAAGGGTTCCCCACT | 228 | >2.09 | nd | nd | nd | nd | nd | nd | nd | nd | nd |
| 5p | | | | | | | | | | | | |
| miR-513a- | ATGACACCTCCCTGTGAA | 229 | >6.38 | nd | nd | >3.28 | nd | nd | nd | nd | nd | nd |
| 5p | | | | | | | | | | | | |
| miR-513b | ATAAATGACACCTCCTTGTGAA | 230 | >1.98 | nd | nd | >1.29 | nd | nd | nd | nd | nd | nd |
| miR-516a- | GAAAGTGCTTCTTTCCTCGAGAA | 231 | >23.45 | nd | nd | >5.80 | nd | >1.65 | nd | >2.27 | nd | nd |
| 5p | | | | | | | | | | | | |
| miR-550 | GGGCTCTTACTCCCTCAGGCACT | 232 | >2.04 | nd | nd | nd | nd | nd | nd | nd | nd | nd |
| miR-557 | AGACAAGGCCCACCCGTGCAAAC | 233 | 4.19 | 1.38 | 2.01 | 1.78 | (nd) | (nd) | −1.15 | 1.57 | (nd) | −1.21 |
| | | | | | | | <−1.39 | <−1.39 | | | <−1.39 | |
| miR-575 | GCTCCTGTCCAACTGGCTC | 234 | >4.55 | nd | nd | nd | nd | nd | nd | nd | nd | nd |
| miR-612 | AAGGAGCTCAGAAGCCCTGCCCAGC | 235 | 5.20 | 2.50 | −1.18 | 1.81 | (nd) | −2.60 | −2.93 | −1.98 | (nd) | −2.85 |
| | | | | | | | <−5.94 | | | | <−5.94 | |
| miR-614 | CCACCTGGCAAGAACAGGCGTTC | 236 | >2.61 | nd | nd | nd | nd | nd | nd | nd | nd | nd |
| miR-630 | ACCTTCCCTGGTACAGAATACT | 237 | >4.81 | nd | nd | >1.88 | nd | nd | nd | nd | nd | nd |
| miR-637 | ACGCAGAGCCCGAAAGCCCCCAGT | 238 | 1.35 | 5.51 | 2.82 | 7.31 | (nd) | (nd) | (nd) | 1.46 | (nd) <−1.81 | 1.52 |
| | | | | | | | <−1.81 | <−1.81 | <−1.81 | | | |
| miR-638 | AGGCCGCCACCCGCCCGCGATCCCT | 239 | 2.50 | 2.06 | 3.13 | 1.32 | −1.55 | −3.45 | −4.86 | −2.17 | −2.60 | −2.40 |
| miR-658 | ACCAACGGACCTACTTCCCTCCGCC | 240 | 3.65 | 3.18 | 1.67 | 3.41 | (nd) | −1.70 | −1.93 | 1.04 | (nd) | −1.76 |
| | | | | | | | <−3.56 | | | | <−3.56 | |
| miR-663 | GCGGTCCCGCGGCGCCCCGCCT | 241 | 3.51 | 2.57 | 2.02 | 1.44 | (nd) | (nd) | (nd) | (nd) | (nd) | (nd) |
| | | | | | | | <−3.06 | <−3.06 | <−3.06 | <−3.06 | <−3.06 | <−3.06 |
| miR-671- | CTCCAGCCCCTCCAGGGCTTCCT | 242 | >7.67 | nd | nd | >5.82 | nd | nd | nd | >1.94 | nd | nd |
| 5p | | | | | | | | | | | | |
| miR-675 | CACTGTGGGCCCTCTCCGCACCA | 243 | 7.25 | 4.60 | (nd) | 4.46 | (nd) | (nd) | −1.07 | 1.88 | (nd) | (nd) |
| | | | | | <−1.19 | | <−1.19 | <−1.19 | | | <−1.19 | <−1.19 |
| miR-708 | CCCAGCTAGATTGTAAGCTCCTT | 244 | nd | nd | nd | nd | nd | nd | <−1.01 | nd | nd | >2.16 |
| miR-744 | TGCTGTTAGCCCTAGCCCCGCA | 245 | 4.02 | 1.97 | 1.40 | 1.40 | (nd) | −2.20 | −3.66 | −1.68 | (nd) | (nd) |
| | | | | | | | <−3.47 | | | | <−3.47 | <−3.47 |
| miR-765 | CATCACCTTCCTTCTCCTCCA | 246 | 25.46 | 3.15 | 3.08 | 6.06 | (nd) | 3.70 | 1.82 | 3.00 | (nd) | 1.02 |
| | | | | | | | <−1.58 | | | | <−1.58 | |
| miR-920 | TACTGCTTCCACAGCTCCCC | 247 | >3.57 | nd | nd | nd | nd | nd | nd | nd | nd | nd |
| miR-923 | AGTTTCTTTTCCTCCGCTGAC | 248 | 6.70 | 1.19 | 1.24 | 1.35 | −2.18 | 1.11 | −1.43 | 1.19 | 2.00 | −2.79 |
| miR-92a- | GTAATGCAACAAATCCCCACCC | 249 | 3.79 | 2.45 | 1.23 | 1.20 | (nd) | (nd) | (nd) | 1.18 | (nd) | −1.59 |
| 2* | | | | | | | <−1.93 | <−1.93 | <−1.93 | | <−1.93 | |
| miR-92b* | CACTGCACCGCGTCCCGTCCCT | 250 | 5.09 | 1.52 | 1.50 | 1.81 | (nd) | (nd) | −3.14 | (nd) | (nd) | (nd) |
| | | | | | | | <−3.06 | <−3.06 | | <−3.06 | <−3.06 | <−3.06 |
| miR-93 | CTACCTGCACGAACAGCACTTTG | 251 | (nd) | 1.27 | (nd) | (nd) | (nd) | 1.17 | −1.22 | 1.14 | 2.52 | 1.03 |
| | | | <−2.50 | | <−2.50 | <−2.50 | <−2.50 | | | | | |
| miR-98 | AACAATACAACTTACTACCTCA | 252 | −4.47 | −1.37 | 1.17 | −2.84 | −4.10 | −1.83 | −2.38 | −1.22 | 1.21 | −4.82 |
| miR-99b | CGCAAGGTCGGTTCTACGGGTG | 253 | (nd) | −1.36 | 1.59 | −2.74 | (nd) | −2.23 | (nd) | 1.30 | −1.51 | (nd) |
| | | | <−3.33 | | | | <−3.33 | | <−3.33 | | | <−3.33 |

TABLE 2

fold-changes in cell lines v. normal Lung

| | | | | | | |
|---|---|---|---|---|---|---|
| | | | | | BEA2B | |
| | | | | | (Immortalized | |
| | | | | | bronchial | |
| | | | | | epithelial | |
| | | probe | H460 | H1703 | cells - | A549 |
| | Array probe sequence | SEQ | (Large cell | (Adeno- | normal | (Adeno- |
| Array probe | (5′ to 3′, without linker) | ID NO: | carcinoma) | carcinoma) | phenotype) | carcinoma) |

| | | | | | | |
|---|---|---|---|---|---|---|
| 3717-L2-1 | CCGCCCTCCCCATAGCCTCACCCCAAACCCACTCACA | 6 | 1.02 | 1.86 | 1.77 | 2.27 |
| 3758-R2-2 | TGCAGGCTCCACTGACATTTTCACAATTTAAATCAT | 254 | −1.85 | 2.07 | 1.89 | 2.26 |
| 3799-R3-1 | CCAGAGGCCCCCCGCCGGCC | 7 | −1.63 | 1.14 | 1.33 | (nd) <6.30 |
| 3820-R3-1 | CCCCCACCCCTCTGTGGGGCCATCCCTG | 255 | 1.60 | nd | nd | nd |
| 3851-R3-4 | GAGCTCCCAACCCTCCTTTATGTTTTGTCTAAAGC | 256 | nd | nd | 6.82 | nd |
| 3874-L3-1 | TGAATATTATCCCTAATACCTGCCACCCCA | 257 | 2.75 | 10.71 | 10.14 | 10.68 |
| 3897-R3-1 | CAGCCGCCTCCCCCTCAGCGTTAA | 10 | −1.97 | 1.50 | 1.79 | 1.75 |
| 3906-L3-1 | AACATATGTAAACCCCTTTATTCCTCATTCTG | 258 | (nd) <4.59 | 1.25 | 1.70 | 2.14 |
| 3923-R3-1 | GCCTCTCACAAAGGATCTCCTTCATCCCTCTCC | 11 | −1.74 | 2.11 | 1.72 | 2.03 |
| 3952-L3-2 | GCGCACAGAGCACTCAATCTGACACCCCTCGC | 259 | −1.66 | 1.90 | 1.73 | 2.13 |
| 3953-R3-2 | ACTCCAGCCTCCGCCGCCTCAGCTTCCCGAGC | 12 | −1.22 | 1.78 | 1.59 | 1.81 |
| 3976-L2-2 | TCATACTCCTGCTTGCTGATCCACATCTGCTGGAA | 260 | 1.58 | 5.83 | 7.55 | 8.31 |
| 3995-L2-2 | CTATAAAACTTCGAAAAGTCCCTCCTCCTCACGT | 13 | −1.17 | 1.41 | 1.31 | 1.36 |
| 4037-R3-2 | GCCTGTTCCCTGGCATGTACTGTAATTTATCT | 15 | −2.05 | 2.26 | 1.66 | 1.88 |
| 4064-R3-1 | CATAGCTGAATTCCATCCCAGCCCCAG | 261 | 2.32 | nd | nd | nd |
| 4118-L2-2 | TCATACTCCTGCTTGCTGATCCACATCTGCTGGAA | 262 | 1.80 | 6.34 | 8.91 | 9.64 |
| 4130-L3-1 | GCCAGCACGCCGTCCATGTCCACCAGCACCC | 263 | −1.51 | 1.55 | 1.91 | (nd) <4.64 |
| 4143-R3-1 | TCAGCGTCTTGCTCTCCTCCTGGTA | 16 | 2.11 | 3.64 | nd | nd |
| 4155-R1-1 | AGACCGGACTCGCCTCTTCCAACTCGAGTTCA | 264 | nd | 3.56 | nd | nd |
| 4182-R2-2 | AGTTCAGCAGCCCAGTGGACATGCTGGGGGTGGT | 265 | 9.76 | 14.90 | nd | nd |
| 4203-R3-2 | GCACATTCCCACTTCCCCAGAGGCAGGCTCCATAT | 17 | nd | 5.60 | 7.52 | nd |
| 4205-R3-1 | ACTTCATCCTCACCACTCACACCACCCTAG | 266 | −1.94 | 1.83 | 2.35 | (nd) <3.98 |
| 4216-R3-1 | TCCCTCCCTTATACACAGATCAATTCCCCC | 267 | −1.53 | 1.78 | 1.86 | 2.51 |
| 4303-R1-1 | AGTGCCCGCTCCTCCGACCTCCCTGCGCACC | 19 | −1.09 | 1.56 | 1.42 | 1.57 |
| 4315-R3-2 | TCCCCGGCCCTCTCCATTCTCGGCTCCGGAGCA | 20 | −1.54 | 1.63 | 1.53 | 1.61 |
| 4340-R3-1 | ATTTTCCAGCCCCTTGTCCCCAGGCCAAAC | 268 | −1.75 | 1.98 | 1.79 | 2.09 |
| 4361-R3-1 | CGTCTCCCTCCCTCATGTGC | 21 | −1.60 | 1.46 | 1.56 | (nd) <4.18 |
| 4391-R2-1 | GCCAAATTCTCAACCAATATAACTCTGTGA | 269 | 2.65 | 7.30 | 10.84 | nd |
| 4413-L3-1 | GGCACCTCCAGCTACAGTAAACAAAT | 270 | −1.65 | 1.74 | 1.74 | 1.99 |
| 4417-R1-1 | GCTCATCAAAAAGTTCCCTGT | 271 | −1.75 | 1.40 | 1.49 | 1.66 |
| 4440-R3-1 | TACTCCCGCCGTTTACCCGCATTTCACTGAA | 272 | −1.71 | 1.75 | 1.76 | 2.23 |
| 4440-L3-1 | TTCAGAGCACTGGGCAGAAATCACATCAC | 273 | −1.70 | 1.70 | 1.81 | 2.20 |
| 4448-R3-1 | CCTACCCCCAGCATCTCCTCACGCCATTGCC | 24 | −1.76 | 2.12 | 1.76 | 2.36 |
| 4479-R3-1 | AGCCCCCTGCCCGGAAATTCAAAACAACTGC | 25 | −1.47 | 1.10 | 1.38 | 1.60 |
| 4498-L3-2 | GAGATCCAGACGGCCGTGCGCCTGCTGCTGCCT | 274 | −1.95 | 2.00 | 1.73 | 2.11 |
| 4567-L1-1 | ATCTGCCCAGTTCCCAGCACACTCCC | 275 | 2.50 | 6.95 | 8.90 | nd |
| 4579-L3-2 | GGCTTCACTTGCCTCCTGCAAAACACCAATAGC | 276 | −1.75 | 1.60 | 1.64 | 1.82 |
| 4593-R3-1 | AGCAGATGACATAACTCCCCCGGCATCAG | 26 | −1.83 | −1.24 | 1.68 | 1.74 |
| 4610-R3-1 | GCCCTCTGGCCCCTGCCTAATTGGCTGC | 277 | 1.04 | 1.55 | 1.43 | 1.66 |
| 4724-L3-2 | CTTGGCATCTCTAGCACCTTCAGCTTTCTGTGCCT | 278 | −1.60 | 1.82 | 1.71 | 1.91 |
| 4754-R3-2 | CCAAAGCCTTAGACAAGTGCCAAGCCCATCTTT | 279 | −1.58 | 1.60 | 2.35 | 2.49 |
| 4801-L3-1 | AACTCTGCCTCCTGTTTGCTACAAAAACATTAAT | 280 | −1.47 | 1.76 | 1.15 | 1.36 |
| 4829-R2-1 | TCCCTTTGTGCTGCCCGAGTGCCTTCCCCCTG | 29 | −1.59 | 1.81 | 1.62 | 1.92 |
| 4855-R3-1 | GGGCTGCCGGGTCTCCCGCTTCC | 30 | 2.95 | 3.52 | 3.97 | nd |
| 4964-L3-2 | AGGGCTAACTTCTGAAAACCCACCAAATTCCCCAA | 281 | −2.00 | 1.44 | 1.52 | 1.79 |
| 5006-L3-1 | ACAGCTCCCTCTGCTGGCTCC | 33 | −2.37 | 1.57 | 1.68 | 1.78 |
| 5071-R2-1 | CCCCAGTCCCAGCCCAATTAATAAATGGG | 282 | −1.48 | 1.42 | 2.11 | 2.49 |
| 5080-R3-1 | CTTGCAAAGGGTCTCCTTCATCCCTCTCCA | 34 | −1.69 | 2.01 | 1.67 | 1.96 |
| 5192-L3-1 | CCCCTTCCTTCCTCTATATCAGCAAAGAC | 283 | −1.45 | 1.75 | 1.73 | 2.15 |
| 5306-L3-2 | CCTCTGACCCCAGCTCTGGCCCTTTCTAGGG | 284 | −1.72 | 1.66 | 1.75 | 2.05 |
| 5327-L3-1 | CTCAACCTCTGGGACTATGTCCTGTCTCC | 285 | nd | 6.36 | 8.44 | nd |
| 5342-L3-1 | CACCACCAAACCAAATGCCGCTGCTCTCCTTCCA | 36 | 2.47 | nd | nd | nd |
| 5372-R3-2 | CCCTCTGTTTTCAACTTACACAAGATTCTTTTT | 286 | −2.07 | 2.01 | 1.61 | 2.10 |
| 5380-R2-2 | GGCTCCCAGATGTGTCCCACATTGAAGAATTATC | 287 | −2.19 | 1.91 | 1.82 | 1.88 |
| 5441-L3-2 | GCCAAGCTCCAAGTCAGTATAGCTAACAGAGCAG | 288 | nd | 3.14 | nd | nd |
| 5474-L3-2 | CTCCTCTCACCTGGCCAGACTCTGACCCACCTAC | 289 | 2.77 | 4.11 | 7.78 | 8.58 |
| 5513-L3-1 | CAACTGTTCTCCATGATGCCTCAGAGCCACTT | 290 | −2.43 | 2.15 | 1.58 | 1.91 |
| 5554-R2-1 | CCCCACCCCCTCATCAGCTGCTCCCAGAT | 38 | −1.67 | 1.88 | 1.71 | 2.23 |
| 5598-R2-2 | CTCCCACCTCCGTGAAGCTATTTTTAACTGTGCA | 291 | −1.27 | 1.56 | 1.62 | 1.72 |
| 5618-R3-1 | TCCCAGCCCACCAGTGCCACATTACAGCCCA | 292 | −1.39 | 1.41 | 1.93 | 1.95 |
| 5619-L3-1 | AATGCCAGTTCTGCTCAATCTTCCCTCAATGAG | 293 | −2.45 | 1.94 | 1.69 | 2.04 |
| 5638-R2-1 | GGCCCTCCCCCTGCCTGTGATAGGCTGCTTG | 39 | −1.06 | 1.87 | 1.63 | 1.59 |
| 5640-L3-1 | GCCATGGAACACCGTGCCTGCCCCTCTCGAGA | 40 | −1.37 | 1.75 | 1.80 | 1.84 |
| 5733-R3-2 | CTCACCCAGCTCATCCTGCTTCTCAGTCCCAC | 294 | −1.58 | 1.47 | 1.34 | 1.76 |
| 5735-L3-1 | AGAAAGTTGCTGTTTCCTCTGGCCTCAAGCCT | 295 | −1.64 | 1.94 | 1.78 | 2.10 |
| 5782-L3-1 | GATTCCAGCCCCTTCCCCC | 42 | 3.41 | 5.68 | 7.06 | 9.69 |
| 5795-R1-1 | CTGCCCTCCAAGAAATAAATTACCCGCAATTACT | 43 | −1.04 | 2.08 | 1.83 | 2.32 |
| 5836-R3-2 | CATTAACCCCCATTATCACAGCACGCCCCATTC | 44 | −1.60 | 1.58 | 2.26 | 2.56 |
| 5854-R3-1 | CCCTCCCTCTCCGAAAGAATGTGTCAC | 45 | −1.42 | 2.05 | 1.96 | 2.24 |
| 5863-L3-1 | GCCGTTGCTGCTGGCAATTCCTGTCG | 296 | −2.05 | 2.24 | 1.56 | 2.05 |
| 5919-L3-1 | AAGCAACACTGTCACTTTATCTCCCTAGA | 297 | −1.92 | 1.46 | 1.50 | 2.28 |
| 5971-R3-1 | CTGCTCAGCCTCCCACATCTGT | 46 | −1.53 | 1.49 | 2.17 | 2.31 |
| 6008-R1-1 | ACAATACCCCCACCTTTTTCCTGTACCTTAC | 47 | 2.16 | 4.91 | 7.51 | 8.14 |
| 6016-R2-1 | AAACTCCAGCAGCCCCGTCAGCCTCCTGCT | 48 | −1.45 | 1.75 | 1.66 | 1.86 |
| 6026-R3-1 | CAGCCACCTTGGTTTTGTGGTTTGGCAAA | 298 | nd | 5.34 | 7.28 | 7.92 |
| 6192-L3-1 | AGATAAAAAACCACCCACCCAGCAC | 52 | nd | 4.46 | nd | nd |
| 6218-R3-1 | AATCACATTACTGCCTCTCATGTCACA | 299 | 4.96 | nd | nd | nd |
| 6235-R3-1 | GCTCCAAAAATCCATTTAATATATTGTCCTT | 54 | −1.96 | 2.79 | −1.84 | (nd) <12.83 |
| 6253-L3-1 | CCTGACAATATCCTGGCTGCCATAATGCCAGC | 300 | −2.63 | 1.74 | 1.98 | (nd) <6.02 |
| 6287-L3-2 | GCCCCGCCCCACCTTTCGGGGCTCACCTGGC | 55 | −2.16 | 1.72 | 1.47 | 1.68 |
| 6355-R3-1 | TCCAGATCATCTGTTCCCTGAGGATTTACAGT | 301 | 1.94 | 5.81 | nd | nd |
| 6409-L3-1 | CGTTCCCAACCGCACGCGCCGCCTTCTGGAAC | 56 | −1.32 | 2.14 | 1.60 | 2.05 |
| 6421-R3-2 | CCCTCCTGTGAGAGTCTGAAGGACACTATTG | 302 | nd | 10.40 | nd | 10.50 |
| 6434-R3-1 | AGCCCTCCCACCAGCCAGCTGCAGTGC | 57 | 1.33 | 1.69 | 1.63 | 1.70 |
| 6450-R3-2 | CTCCAATGGTGCTCTCCTGGTACTCATGGAAC | 303 | 1.41 | nd | nd | nd |
| 6478-R2-2 | GCCAAATTCTGCCCCTGGATATGCATGCACAATT | 304 | −1.72 | 1.93 | 1.69 | 2.04 |
| 6496-R3-1 | CCCCTCCCCCACCCACCACTTCCCCTAGAGTCC | 60 | −1.36 | 1.95 | 2.28 | 2.20 |
| 6554-L3-2 | TCCTTGTCATCTAGAACTACTTTGGTGCCTCCATA | 305 | nd | 3.79 | nd | nd |
| 6584-L1-1 | TCGGCCCTGCCTCCTCCTCCT | 61 | −1.36 | 1.82 | 1.33 | 1.52 |
| 6602-R3-2 | AGAGCCCCAGTGGAAATCTCTCCTCCAAATCCAT | 62 | 2.63 | 13.21 | 10.59 | 18.66 |
| 6642-R3-1 | CACGTCCTCCCCTCCCCTCGAGGTGTCACACA | 63 | 1.20 | 1.79 | 1.25 | 1.90 |
| 6647-R2-1 | CTCAGCCCCAGCTGGAGAATTTTTCCCCTCATTA | 306 | 1.56 | nd | nd | nd |
| 6664-R2-1 | GCCACCACCTCTCTTTTTCACAGGACATTACCA | 307 | nd | nd | 5.29 | nd |
| 6681-R2-1 | CCTGTTTTCTCCCCTCTCTCTCTGCCCCTCC | 64 | 4.99 | 7.90 | 9.03 | 11.45 |
| 6712-L2-1 | GCTGTGGTCTTGTGATATCAGTTGTCAGCCTG | 308 | 1.83 | 4.86 | 4.41 | nd |
| 6718-L3-2 | GCCTCCACCACCATAGGGGCCAGAGCTTCTGCCT | 309 | −1.53 | 2.03 | 1.89 | 1.92 |
| 6718-R3-1 | ATAGCCACCTTGGTTTTGTGGTTTGGCAAAG | 310 | 1.66 | 7.03 | nd | nd |
| 6752-R1-1 | CCCTCCTTTCCCCACCTCAGT | 66 | −2.15 | 1.89 | 1.60 | 2.23 |
| 6803-R3-1 | GCTCCCTCTCTGGTTGGACCTCACCCAAAGAT | 68 | −1.53 | 2.01 | 1.94 | 2.16 |
| 6839-L3-1 | GCCCGCTGGGCCCTGCCACCCCCACCCCT | 69 | −1.88 | 1.57 | 1.43 | 1.81 |
| 6880-L3-2 | ACCTCCCCCGCGAAGACATCCACATTCTGCA | 70 | −2.04 | 1.49 | 1.48 | 2.07 |
| 6906-L3-1 | GTGTCTTCTCCCCAACCAGCCAGCTCTCCTGG | 71 | nd | 3.61 | nd | nd |
| 6912-L3-1 | GCCTTCAGCCTCTGGGTCCAGCAGTTAATTCT | 311 | −1.45 | 1.82 | 1.06 | 1.68 |
| 6930-R3-1 | ATTAATCCTTCTCTCCCCTCTG | 72 | 2.11 | nd | nd | nd |
| 7019-R3-1 | AGCATCAAACCTCCGTGCTAAATTTAAA | 312 | 2.73 | nd | nd | nd |
| 7061-R3-1 | ATGGAAACCCCACCCTTCCC | 75 | nd | 5.97 | nd | nd |
| 7070-R3-1 | AGTCAACCTATACTGTCAGCACCAGGACCCAC | 313 | (nd) <3.72 | 1.57 | 2.14 | 2.63 |
| 7089-R1-1 | CCTGAGCCAGCTCACATCACCCCTGACC | 314 | −2.12 | 1.57 | 1.68 | 2.43 |
| 7126-L3-1 | GCACACCCGCTCTCCGGCCCGCGCCCCTG | 77 | −1.46 | 1.95 | 1.68 | 2.00 |
| 7158-R3-1 | TACATTTATAGATTCCCTCTTCAGCCATA | 315 | nd | nd | 8.25 | nd |
| 7292-L3-4 | GTCACCCAGTTAAATAGCTTCTGAACCTCCCTGCA | 316 | (nd) <4.32 | 1.40 | 1.39 | (nd) <4.32 |
| 7304-L3-1 | TTGATCCAAGCTCCCACATTTG | 317 | 1.98 | 5.85 | 8.70 | 8.84 |
| 7340-R3-1 | CTGCCACCAACTCTAATTGATTC | 318 | (nd) <4.01 | 1.56 | 2.37 | 2.64 |
| 7352-R3-2 | GCCCCTGCCAGAATCCTCTAACAGCTCTAATTGG | 81 | −1.43 | 1.57 | 1.61 | 2.40 |
| 7356-R2-1 | GAAGCTCCGCGGCGACGTCCCGTTACTCC | 83 | −1.80 | 2.04 | 2.41 | 3.11 |
| 7375-L3-1 | AGCGCTGCTGTCTCCACAGTTACATACCTG | 319 | nd | 7.15 | 9.97 | 12.05 |
| 7384-R3-1 | CTCGCAAAGGATCTCCTTCATCCCTCCCCA | 85 | −1.49 | 2.00 | 1.91 | 2.17 |
| 7411-R3-2 | AGTCCCCTGCCTCATCTGCCACCCCTAATGAC | 86 | −1.61 | 1.70 | 1.62 | 1.87 |
| 7421-R2-1 | TAAAGAGACTTCCTCCACTGCCAGAGATCT | 87 | 2.12 | 4.83 | 8.07 | nd |
| 7426-L3-1 | TGGGAGACGAACACCTCCTGCTGTGCTTG | 88 | 4.29 | nd | nd | nd |
| 7435-L3-2 | CTCCCCATCTGTTGCTAAGCCCCATTAGCTGTGT | 320 | −1.79 | 2.09 | 1.86 | 2.33 |
| 7543-L3-2 | TGCCGATGTCGTCCTAATTCACCAGGCCCCGA | 321 | nd | 3.71 | 6.97 | nd |
| 7571-L1-1 | AGGGCTCCCCCACCCCTAAG | 90 | −1.73 | 1.43 | 1.50 | 1.43 |
| 7572-R2-1 | ATCACCCTTCCCCCTCCCAAATAAAG | 91 | −1.39 | 1.80 | 1.94 | 2.21 |
| 7578-L3-1 | CGCAGTGCACACCCTGAGCTACAGCCCCTC | 92 | 1.13 | 6.99 | 5.80 | 1.72 |
| 7597-L3-1 | TTAATGGAACCTGGGCTCTGTGTC | 322 | 1.75 | 4.17 | 8.05 | 8.93 |
| 7660-L2-1 | CCCGGCCTCCGCCTGGCCCGAGCGATAA | 93 | −1.11 | 1.74 | 1.69 | 1.78 |
| 7702-L2-1 | CCCAGAGAACCGGAATTCCTCCCCGCCCC | 94 | −2.10 | 1.41 | 1.47 | 1.48 |
| 7726-R3-2 | CATCCCTCTCCAGAAGAGGAGAAGAGGAAACA | 95 | −1.60 | 1.79 | 2.31 | 2.56 |
| 7763-R3-1 | GTGCTCCCAATCCAGACGATCCATTA | 323 | −1.67 | 1.67 | 2.28 | 2.52 |
| 7764-R3-2 | CCCTCTCTGCCTCTCTCATCACCAATAACAGAC | 96 | −1.09 | 1.93 | 1.74 | 2.01 |
| 7824-R3-1 | TGGTGCCAGCTTCATCGCCG | 324 | nd | 3.25 | nd | nd |
| 8004-R3-2 | GGAACTGCTTCTCCTTGCTCCAGTCATTGAAG | 97 | nd | 3.51 | nd | nd |
| 8016-L3-1 | TCAGCGCAACAAGCCCCGCAGTCACCCCTCT | 98 | −1.99 | 1.68 | 1.62 | 2.30 |
| 8075-L3-1 | CCCAGCTACACCTCCACGCA | 325 | −1.64 | 1.92 | 1.68 | 1.83 |
| 8077-R3-1 | CCATTCCCCACCCTCAGGTAGTAAAAATA | 99 | −1.69 | 1.48 | 2.13 | 2.56 |
| 8169-L3-1 | AACAGAAATGATTATTTACCTCCCCACATG | 100 | −2.46 | 1.52 | 1.79 | (nd) <5.79 |
| 8250-R3-1 | CAGCCGCCTCTCCCTCAGCGTTAA | 101 | −1.41 | 1.55 | 1.60 | 1.84 |
| 8263-R3-1 | GATTAAAAACAAGAATCTATCTTCCCCCAGT | 102 | nd | nd | 5.24 | nd |
| 8281-L3-1 | AGCCCCTCCCCAGCTGCAGCTGAGGGCTGG | 103 | −1.34 | 1.78 | 2.04 | 2.78 |
| 8336-R3-1 | CTCAGTCCCCACACCCCCAGCCAGAGTC | 326 | −1.64 | 1.95 | 1.94 | 2.16 |
| 8394-L3-1 | CCCCCGCCCTGCCCATCTCCGACT | 105 | −1.43 | 1.63 | 1.71 | 1.75 |
| 8433-L3-1 | AAATGGCTCCTTTCCCCTTTCCCTCCACCG | 106 | −1.35 | 1.78 | 1.76 | 2.47 |
| 8434-R3-1 | CCTGAGGCTCCACTCCTAGAAGAATTGC | 327 | −1.61 | 2.16 | 1.98 | 2.42 |
| 8552-R3-1 | CTCCCAAGGGTCACCATAAAGAGGACACTATAAA | 328 | nd | 3.14 | nd | nd |
| 8564-L3-1 | CCCTTCACCCCAGTTGCCAAACA | 107 | nd | nd | 5.92 | nd |
| 8587-R2-1 | CTCGCCGGCTCCAAACTTTCCCCAACTCCAGG | 329 | −2.38 | 1.99 | 1.58 | 2.15 |
| 8685-L3-1 | CTGCTCTTTGCCTCCTATAAGTGGAATGTCTCCC | 330 | −1.07 | 2.02 | 1.43 | 1.80 |
| 8719-L3-2 | CTCACTTGCCTCCTGCAAAGCACCAGTAGCTGC | 331 | nd | 3.12 | nd | nd |
| 8724-R3-1 | GCCAAGCTTGGAACCTCTCCCTGCCAGCATCAC | 109 | nd | 3.62 | 7.40 | nd |
| 8731-R3-1 | TCATTCATGCCCCATCCTGCCAG | 110 | −1.66 | 1.77 | 1.84 | 2.45 |
| 8760-L3-1 | CTGGAGCCCCGAGGCAAAACTCACCCCAGGCA | 332 | −1.85 | 1.57 | 2.29 | 2.59 |
| 8808-R3-1 | CCAAAGACCCCTTTCTCCCAGCCTGTTTCTGCAA | 111 | −1.69 | 2.22 | 1.94 | 2.25 |
| 8898-R3-1 | CGGACGCCCGCTCCCGCCA | 112 | −1.39 | 1.61 | 1.58 | 1.74 |
| 8898-L3-1 | GAGTTGCCGGCGGCCGCCCCGGCCGACAGCGCC | 333 | −1.51 | 1.99 | 1.88 | 2.15 |
| 9053-L3-1 | GGCCCTGGGAATCAGAGAGACAGTGCCCTTCC | 334 | −1.75 | 2.11 | 1.90 | 2.20 |
| 9053-R3-1 | TTCTTGCCCTCCAATCCCCGGGCTCCACCAGCC | 114 | −1.57 | 1.95 | 1.65 | 2.13 |
| 9068-R2-1 | CTGCCCTCCCTCTTGATCAAGACTGCTCTCCTAA | 115 | nd | nd | nd | 71.77 |
| 9092-R3-2 | TCCTAGAAGCCATCAGTATCCCACAGAGCCAG | 335 | −1.79 | 1.53 | 2.01 | 2.23 |
| 9217-L3-1 | ACGATCCCCGCCGTGACTAAAGCCAACAGTGGA | 117 | −1.38 | 2.00 | 1.87 | 2.15 |
| 9245-R2-1 | AACCTCTCATTAGCCAGCCACTCGCTCCCAAG | 118 | 1.91 | 4.41 | 6.66 | nd |
| 9387-R2-2 | TCCATCCTTGCCGTCGCCTTCATCTCAAAGCCATC | 122 | 1.93 | nd | nd | nd |
| 9507-L3-2 | GTCTCCCTCATCCATCATCC | 124 | −1.86 | 2.14 | 1.82 | 2.24 |
| 9557-R3-1 | ACTGGCCCAGTCCATTCTGCACCTCTTGCCCTA | 336 | −1.26 | 1.52 | 1.53 | 2.58 |
| 9582-R3-2 | TACAAATCCTCAGATGTTTCCACAAAGGCTCCCTT | 337 | −1.80 | 1.69 | 2.19 | 2.19 |
| 9688-L2-1 | GCTAAATGGCCCCAGACTGTTCTGCTGCA | 338 | nd | 3.61 | 6.62 | nd |
| 9694-R3-1 | GCCATCTGCCACCGACACTCATACTCTGT | 339 | −1.27 | 1.56 | 1.76 | 2.24 |
| 9733-L3-1 | AAGGCTGTCCCTCACCAGACTTCCCCACCCCT | 129 | −1.55 | 2.36 | 2.12 | 2.58 |
| 9747-L3-1 | GCACACCGCCTCCGGCAAACTGC | 340 | −1.27 | 1.88 | 1.37 | 1.56 |
| 9772-L3-1 | ATTCTACAGCATTTTTCCCATGACCTTTCCTGA | 341 | −2.02 | 2.12 | 1.72 | 2.14 |
| 9774-R2-2 | CCGCCCCCTCACCGCCTCCTGCTCCCATCAGGC | 130 | −1.09 | 1.68 | 1.54 | 1.66 |
| 9798-R3-2 | GTGCTTTCATTCCCCCAACAGAAGGGCATTA | 342 | −2.10 | 1.69 | 2.24 | 2.40 |
| 9812-L3-1 | AAGCTCTATTTATCTGGGCTCCCCAGCTTGCT | 343 | −1.54 | 1.49 | 2.00 | (nd) <4.17 |
| 9813-R3-2 | GAAAGTAGAATTTGGCCCTCCAACTGTACAGGATGA | 344 | −1.08 | 1.68 | 1.65 | 1.87 |
| 9816-R2-1 | CTGGCCCTTTAAGAGCCTCTCCGCGCGCTGCCG | 131 | −1.25 | 1.26 | 1.67 | 1.80 |
| 9987-R2-2 | CAGGCTTCACCCCTCAGCCCACTTTGTTAAC | 345 | −1.73 | 2.09 | 1.92 | 2.17 |
| 10010-R2-1 | CTCGCCGGCTCCAAACTTTCCCCAACTCCAGG | 346 | −1.90 | 2.06 | 1.75 | 2.07 |
| 10030-R3-1 | AACTCAGCTGCCTTCCGCC | 134 | −1.41 | 1.98 | 1.48 | 1.79 |
| 10093-R2-2 | ACCAGCCAGACCCCCTGTAGGTCTAACCCAAGGT | 347 | −2.07 | 2.17 | 1.72 | 2.24 |
| 10120-R3-1 | TTCCCCTTGTTAAAATTACAGCTGCACCA | 348 | −1.97 | 1.92 | 1.73 | 1.98 |
| 10133-R3-1 | CTCCTCCCATTTCCTAATTTGATTTCAC | 349 | −1.45 | 1.90 | 1.88 | 2.28 |
| 10138-L2-1 | AGCCTGCTCCGCTCTCCCCTCCCACCAGAAAAAGT | 135 | 1.10 | 1.72 | 1.74 | 1.93 |
| 10154-R1-1 | GATCTGTGCCCTTTGCCCTT | 350 | 3.51 | 7.66 | 5.06 | (nd) <8.10 |
| 10198-R3-1 | AATTCTCTTTACCTGGCACCTTTAGGGCAAAGCA | 351 | 1.64 | 3.88 | 7.36 | 8.75 |
| 10231-L3-1 | GTGCAGCAGCCCGCGCCAGCCTCCGCAGCCGCC | 139 | −1.49 | 1.78 | 1.67 | 1.98 |
| 10231-R3-1 | TGAACTTTAGCTGGGCCGCCGCCTGTCAGC | 140 | −2.21 | −1.70 | −1.39 | (nd) <8.10 |
| 10242-R3-1 | GGAAGAAGCCCTTCCGCTTCCACCCCGAACAC | 141 | −1.11 | 1.49 | 1.33 | 1.40 |
| 10260-L3-1 | AGGGCCCCCACCCGATGTCTCCCAC | 352 | −1.85 | 2.24 | 1.79 | 2.27 |
| 10333-L3-1 | TGTGCCCTGCCCACCCCCTCCCCTGCCCCG | 142 | −1.21 | 1.48 | 1.74 | 1.85 |
| 10335-L3-1 | CACTCCCCTCCTTTTTAATTAGAAAGCACTAAGA | 143 | −1.31 | 1.94 | 1.97 | 2.22 |
| 10342-L2-1 | CCACTTTCCTGGCGACCCTCCGTGCGTGGG | 353 | −1.41 | 1.54 | 1.44 | 1.68 |
| 10342-R2-2 | CCCGCCGCCGGAGCATCTCGAAGTTAATTAAA | 144 | −2.74 | −2.11 | −1.51 | (nd) <13.60 |
| 10346-R3-2 | AGCCTGTCTGTGCCCTCTGCAGCAGCTCACC | 354 | 2.40 | 4.47 | 4.41 | nd |
| 10366-R3-2 | AAACACCACCCACGCTCTTGCTACAAGACCCACAT | 145 | −1.64 | 1.88 | 1.91 | 2.29 |
| 10539-R3-1 | TATTTGAGAAAATTTACTATCCCCCAGCCT | 355 | −1.64 | 1.82 | 1.96 | 2.08 |
| 10543-R3-1 | GCCTTCACCCTTCCCATCC | 356 | −1.44 | 1.70 | 1.76 | 2.27 |
| 10553-R1-1 | GCTGGCTCCATGCTCCAGTGGG | 357 | −2.27 | 2.01 | 1.64 | 2.01 |
| 10562-L1-2 | GGGTCCTGACTCCCACAGCCTGTCATATCAAGCGC | 358 | 2.42 | 6.15 | 8.86 | 8.95 |
| 10594-L3-1 | ATTGTTACCCACACCAACACCCACTCAACAG | 359 | −1.91 | 1.96 | 1.74 | 2.18 |
| 10639-R2-1 | AGACCGGACTCGCCTCTTCCAACTCGAGTTCA | 360 | 1.44 | nd | 6.00 | nd |
| let-7a | AACTATACAACCTACTACCTCA | 166 | −1.87 | −1.06 | 1.39 | −1.34 |
| let-7b | AACCACACAACCTACTACCTCA | 167 | −1.85 | −1.12 | 1.72 | −1.38 |
| let-7c | AACCATACAACCTACTACCTCA | 168 | −2.23 | −1.18 | 1.47 | −1.30 |
| let-7d | AACTATGCAACCTACTACCTCT | 169 | −2.07 | −1.13 | 1.38 | −1.40 |
| let-7e | AACTATACAACCTCCTACCTCA | 170 | −2.12 | −1.05 | 1.46 | −1.10 |
| let-7f | AACTATACAATCTACTACCTCA | 171 | −1.94 | 1.00 | 1.29 | −1.33 |
| let-7g | AACTGTACAAACTACTACCTCA | 172 | 2.40 | 1.81 | 1.31 | 1.75 |
| let-7i | AACAGCACAAACTACTACCTCA | 173 | 3.29 | 1.99 | 1.31 | 2.02 |
| miR-100 | CACAAGTTCGGATCTACGGGTT | 174 | −3.44 | 1.01 | 1.30 | (nd) <7.51 |
| miR-103 | TCATAGCCCTGTACAATGCTGCT | 361 | 3.15 | 4.00 | 3.73 | nd |
| miR-106a | CTACCTGCACTGTAAGCACTTTT | 362 | −1.18 | 1.46 | −1.32 | (nd) <8.74 |
| miR-106b | ATCTGCACTGTCAGCACTTTA | 363 | 3.49 | 7.29 | 4.80 | nd |
| miR-107 | TGATAGCCCTGTACAATGCTGCT | 364 | 3.09 | 4.03 | 3.57 | nd |
| miR-125a-5p | AGGGACTCTGGGAAATTGGACACT | 365 | nd | 4.38 | 4.89 | nd |
| miR-125b | TCACAAGTTAGGGTCTCAGGGA | 179 | nd | 9.62 | 7.23 | nd |
| miR-130a | ATGCCCTTTTAACATTGCACTG | 366 | 2.00 | 4.87 | 5.06 | nd |
| miR-130b | ATGCCCTTTCATCATTGCACTG | 367 | 1.85 | 4.20 | 4.06 | nd |
| miR-134 | CCCCTCTGGTCAACCAGTCACA | 368 | −1.92 | 1.87 | 1.64 | 1.92 |
| miR-138 | CGGCCTGATTCACAACACCAGCT | 369 | 1.56 | nd | nd | nd |
| miR-155 | ACCCCTATCACGATTAGCATTAA | 187 | nd | nd | 3.73 | nd |
| miR-15a | CACAAACCATTATGTGCTGCTA | 370 | nd | nd | 5.75 | nd |
| miR-15b | TGTAAACCATGATGTGCTGCTA | 371 | nd | nd | 6.48 | nd |
| miR-16 | CGCCAATATTTACGTGCTGCTA | 188 | −1.03 | 2.33 | 3.10 | (nd) <5.85 |
| miR-17 | CAAAGTGCTTACAGTGCAGGTAG | 372 | −1.18 | 1.52 | −1.35 | (nd) <8.91 |
| miR-181a | ACTCACCGACAGCGTTGAATGTT | 373 | −1.45 | (nd) <3.46 | −1.05 | (nd) <3.46 |
| miR-181b | ACCCACCGACAGCAATGAATGTT | 374 | 2.17 | nd | nd | nd |
| miR-191 | CAGCTGCTTTTGGGATTCCGTTG | 375 | 1.89 | 6.53 | 3.50 | nd |
| miR-195 | GCCAATATTTCTGTGCTGCTA | 376 | nd | 4.38 | 5.32 | nd |
| miR-196b | CCCAACAACAGGAAACTACCTA | 377 | 1.49 | nd | nd | nd |
| miR-198 | GAACCTATCTCCCCTCTGGACC | 190 | nd | 5.34 | 7.25 | nd |
| miR-19a | TCAGTTTTGCATAGATTTGCACA | 378 | −1.38 | 1.29 | −1.40 | (nd) <7.33 |
| miR-19b | TCAGTTTTGCATGGATTTGCACA | 192 | −1.42 | 1.30 | −1.56 | (nd) <10.00 |
| miR-200b | TCATCATTACCAGGCAGTATTA | 193 | (nd) <8.612 | (nd) <8.61 | (nd) <8.61 | (nd) <8.61 |
| miR-200c | TCCATCATTACCCGGCAGTATTA | 194 | (nd) <18.47 | (nd) <18.47 | (nd) <18.47 | (nd) <18.47 |
| miR-205 | CAGACTCCGGTGGAATGAAGGA | 195 | (nd) <28.34 | (nd) <28.34 | (nd) <28.34 | (nd) <28.34 |
| miR-20a | CTACCTGCACTATAAGCACTTTA | 379 | −1.33 | 1.22 | 31 1.87 | (nd) <8.17 |
| miR-20b | CTACCTGCACTATGAGCACTTTG | 380 | −1.53 | 1.33 | −1.76 | (nd) <6.30 |
| miR-21 | TCAACATCAGTCTGATAAGCTA | 196 | −7.45 | 1.45 | 1.38 | 1.98 |
| miR-22 | ACAGTTCTTCAACTGGCAGCTT | 381 | −1.31 | −1.07 | 1.33 | −1.71 |
| miR-221 | GAAACCCAGCAGACAATGTAGCT | 382 | −4.50 | −1.92 | −1.27 | −2.19 |
| miR-222 | ACCCAGTAGCCAGATGTAGCT | 383 | −3.60 | −2.07 | −1.17 | (nd) <11.32 |
| miR-23a | GGAAATCCCTGGCAATGTGAT | 197 | −2.44 | −1.24 | 1.05 | (nd) <14.57 |
| miR-23b | GGTAATCCCTGGCAATGTGAT | 199 | −2.14 | −1.20 | 1.22 | −1.04 |
| miR-24 | CTGTTCCTGCTGAACTGAGCCA | 200 | −2.89 | 1.30 | 1.02 | 1.18 |
| miR-25 | TCAGACCGAGACAAGTGCAATG | 384 | 3.98 | 8.33 | 5.07 | nd |
| miR-26a | AGCCTATCCTGGATTACTTGAA | 202 | −3.08 | 1.23 | 1.24 | (nd) <7.67 |
| miR-26b | ACCTATCCTGAATTACTTGAA | 203 | nd | 3.58 | nd | nd |
| miR-27a | GCGGAACTTAGCCACTGTGAA | 204 | −2.28 | −1.28 | −1.04 | 1.02 |
| miR-27b | GCAGAACTTAGCCACTGTGAA | 205 | −1.92 | 1.27 | 1.14 | 1.38 |
| miR-29a | TAACCGATTTCAGATGGTGCTA | 207 | −1.77 | 1.26 | −1.01 | −1.07 |
| miR-29b | AACACTGATTTCAAATGGTGCTA | 208 | 1.16 | 1.16 | −1.30 | (nd) <5.77 |
| miR-29c | GAACACCAGGAGAAATCGGTCA | 385 | −1.29 | 1.29 | −1.29 | (nd) <7.48 |
| miR-30a | ACATTTGTAGGAGCTGACCTTC | 386 | −1.62 | 3.78 | 2.06 | (nd) <4.49 |
| miR-30d | CTTCCAGTCGGGGATGTTTACA | 216 | 2.12 | 16.27 | 7.18 | nd |
| miR-31 | AGCTATGCCAGCATCTTGCCT | 387 | −10.63 | −2.12 | −2.25 | −1.74 |
| miR-320a | TTTTCGACCCAACTCTCCCGCT | 388 | −1.22 | −1.05 | 1.49 | 1.15 |
| miR-335 | ACATTTTTCGTTATTGCTCTTGA | 389 | nd | nd | 3.55 | nd |
| miR-342-3p | AGAGTGTGTCTTTAGCGTGGGCA | 390 | −3.37 | 1.81 | 1.25 | 1.76 |
| miR-370 | ACCAGGTTCCACCCCAGCAGGC | 391 | 2.02 | 5.04 | 8.94 | nd |
| miR-424 | TTCAAAACATGAATTGCTGCTG | 222 | nd | nd | 5.25 | nd |
| miR-452 | TCAGTTTCCTCTGCAAACAGTT | 392 | nd | nd | 4.54 | nd |
| miR-494 | GAGGTTTCCCGTGTATGTTTCA | 393 | 1.30 | 2.20 | 1.01 | 1.55 |
| miR-513a-5p | AAGTGTCCCTCCACAGTA | 394 | 3.47 | 5.11 | 7.21 | nd |
| miR-614 | CCACCTGGCAAGAACAGGCGTTC | 236 | −1.85 | 1.83 | 1.69 | 1.99 |
| miR-638 | AGGCCGCCACCCGCCCGCGATCCCT | 239 | −1.95 | −1.02 | 1.09 | −1.05 |
| miR-658 | ACCAACGGACCTACTTCCCTCCGCC | 240 | −1.35 | 1.50 | 1.30 | 1.60 |
| miR-663 | GCGGTCCCGCGGCGCCCCGCCT | 241 | −1.86 | 1.08 | 1.37 | (nd) <6.22 |
| miR-671-5p | TCCTTCGGGACCTCCCCGACCTC | 242 | 1.85 | nd | nd | nd |
| miR-7 | ACAACAAAATCACTAGTCTTCCA | 395 | 3.27 | nd | nd | nd |
| miR-765 | CATCACCTTCCTTCTCCTCCA | 246 | nd | 4.51 | nd | nd |
| miR-92-a | ATAACGTGAACAGGGCCGGACA | 396 | 4.00 | 6.61 | 3.83 | nd |
| miR-93 | CTACCTGCACGAACAGCACTTTG | 251 | −1.07 | 1.75 | −1.04 | (nd) <5.78 |
| miR-98 | AACAATACAACTTACTACCTCA | 252 | −1.90 | −1.05 | 1.43 | (nd) <5.20 |
| miR-99a | CACAAGATCGGATCTACGGGTT | 397 | −2.49 | 1.13 | 1.31 | (nd) <5.34 |
| miR-99b | CGCAAGGTCGGTTCTACGGGTG | 253 | 2.05 | 4.50 | 3.79 | nd |

TABLE 3

| Pre-target | | | pre-micro |
|---|---|---|---|
| RNA Candidate | chrom. Location | Pre-microRNA sequences | RNA SEQ ID NO: |
| 266-R4-1 | 12q14.3 | GTTGCTATTTCCCTCAGTTGAGGGCGAAGTTAGCAAATCCGTAGCTGCAAGTCTCAACTTGGGGGAGGGGGCGAC | 398 |
| 673-L4-1 | 01p36.21 | GTGAGGAGCAGGTTAGCTGGGTGAAAAGTTCACAGTGAGGGGAGCTGTCTGTTCCCTCGCTTAATTTATCCACTATTTGGCTAACCTTGCTCTGAAC | 399 |
| 836-R4-1 | 03q26.2 | AAATAAGCCATTCCAAACCATTCTCTGATTTGCTGTGAGTGGCAGAATCATTCACCGTGGTGAATCATAGCAGGGAGAACCATTTGGAATGATTATTT | 400 |
| 3249-L4-1 | 01q22 | GGCGGCGGCGGCGGCGGCTCCGGGGATGGCGGCGGCTCCGCTGCTGCTGCTGCTGCTGCTCGTGCCCGTGCCGCTGCTGCCGCTGCT | 401 |
| 3371-L4-1 | 18q21.33 | CTCAAGTGTGGGGAGTCATGGGGTGTGGAGGGGAGGAAAGGAAAGGTATTTTGTTTCTTTGTCTATACATTTCCTAGATTTCTATGCAGTTGGG | 402 |
| 3717-L2-1 | 01q22 | TGTGAGTGGGTTTGGGGTGAGGCTATGGGGAGGGCGGGGTGCCGCCTTGCCCAGCCCCTGAGGGCCCCAGCCCAGTACA | 403 |
| 3799-R3-1 | 11q13.1 | GAATTTGCCCTACGGTGTGACCCCAGCCTCTCCCTCTGGCCACAGCCAGGGCCGGCGGGGGGCCTCTGGGAGCATCTTCAGCAAGTTC | 404 |
| 3872-L1-1 | 16p13.2 | GTGCATAAGGGAAGAAGACAAGAAAATGATATTGTCGTTTAATAGTTCACTTTAGATCTTCATCTCTTATCAC | 405 |
| 3875-R3-1 | 05p15.1 | GGCTCGGTTTCAAATCTCTCCTAATCCACTAATGAACCTTTATTAAAGTGGGAGAGAGAGGTTGAATCAGTC | 406 |
| 3897-R3-1 | 09p11.2 | CGGAGCCGCCCGCGCCAGCCTCTCCATCTCGCAAGTTTTAATTAACGCTGAGGGGGAGGCGGCTGACGGGCGGGTCGG | 407 |
| 3923-R3-1 | 19p12 | GGCTCTGCACCAGGCGTTTCTTCTTGTGTTTCCTCTTCTCTTCTGGAGAGGGATGAAGGAGATCCTTTGTGAGAGGC | 408 |
| 3953-R3-2 | 09q33.3 | GCTCCTGCTCCGCCGCGGGAGCTGCTCCGGCGGCCGCAGGGCTCGCTCGGGAAGCTGAGGCGGCGGAGGCTGGAGT | 409 |
| 3995-L2-2 | 07p21.1 | TGGCCTGACGTGAGGAGGAGGGACTTTTCGAAGTTTTATAGGAAAGTTTCCGCTTTCCAGTCCCCCTCCCCCGTCCCA | 410 |
| 4026-R3-1 | 10q24.32 | GGCTCTGGGAAAGCCTTCCTTTCCCGGCTGGCCTGGCATTCAAAGCCAGACAAAGGGGGGCTTTCTCTCTCGCC | 411 |
| 4037-R3-2 | 03q13.31 | GCCCATTTCCCTAATGGCAGCCGATTGCCATTTGCTATTCAAATCAGACTAGATAAATTACAGTACATGCCAGGGAACAGGC | 412 |
| 4143-R3-1 | 22q12.3 | TCAGCGTCAGGAACTTCATCCTGGCAGCCGACCTCATGAAGAGCATCTGGCTGCTGTTACCAGGAGGAGAGCAAGACGCTGA | 413 |
| 4203-R3-2 | 11q23.3 | AGCAATTCCAACTGCCCCATTTATATTCCTAAGTAGAGGACTTGTTAATATGGAGCCTGCCTCTGGGGAAGTGGGAATGTGCT | 414 |
| 4205-R3-2 | 15q26.2 | GTCATAGATGGCCTCATTGTCTACCATGAAGCACAATCAGAGTGCTCTAGGGTGGTGTGAGTGGTGAGGATGAAGTTGTAGGGC | 415 |
| 4205-R3-1 | | | |
| 4303-R1-1 | 22q11.21 | GGCTGGCCAGGCTCCGCCCCCGGCCCTCCCTGCGCCCGGCCGGTGCGCAGGGAGGTCGGAGGAGCGGGCACTGCCCACCC | 416 |
| 4315-R3-2 | 01q22 | GCTCCCCGGCTCCCTCACTGCGGCAGCCGCGGCCCCATAAATCGTGAGAGCGACGTGCTCCGGAGCCGAGAATGGAGAGGGCCGGGGAGC | 417 |
| 4361-R3-1 | Xp11.22 | TGCTGGAGGTAAGGGTTTTCTGAAGCCTGGTGCCATGGCCACATGTGCACATGAGGGAGGGAGACGCTGAGGCTAGCA | 418 |
| 4440-L3-2 | 07q11.22 | GTGATGTGATTTCTGCCCAGTGCTCTGAATGTCAAACTGAAGAAATTCAGTGAAATGCGGGTAAACGGCGGGAGTAACTATGAC | 419 |
| 4440-L3-1 | | | |
| 4440-R3-2 | | | |
| 4440-R3-1 | | | |
| 4448-R3-1 | 01p36.32 | TTTCCTCTCTCCTTTCTCCTCAAGCTGATTAGCGGGTCGGGCAATGGCGTGAGGAGATGCTGGGGGTAGGAAA | 420 |
| 4479-R3-1 | 01p32 | CCCAAGCTCCTTCCTGGAGGACTTAACACTGTGTTGAGCAGTTGTTTTGAATTTCCGGGCAGGGGGCTGCAAAAGGG | 421 |
| 4593-R3-1 | 15q23 | CAATCAATTAGCACATGAGTAATACCAAGCCCATTAGGACAAACTGATGCCGGGGGAGTTATGTCATCTGCTATAGAAATGATTG | 422 |
| 4666-R4-1 | 01q22 | GCCGGCTCCAACCCAGAGGCCCGGAATAGGCGCGGAGTTATAAATAGTGCCACCCGCAGGTGTTGGGGGGAGTCGGC | 423 |
| 4790-L4-1 | 02q14.1 | CCCAGAATTCTAGTAATGAGGGAGACAGGTTATGCCAAGCCTGCTTCTCCCAGGATGCACTGGGAGCCTGGG | 424 |
| 4829-R2-1 | 01q21.3 | GGTGTGTCTGCCTCTCTTTCTGCCCCCCTATACCCCTTGACCCCAGGGGGAAGGCACTCGGGCAGCACAAAGGGAGCAGATGCCC | 425 |
| 4855-R3-1 | 12q13.2 | GGGTCCGGGTCTCTACCGCGCCCTCATGCAGGAGGCCCTTGGAGCAGGAGGGGGAAGCGGGAGACCCGGCAGCCC | 426 |
| 4875-R2-2 | 03p22.1 | TGTGAAGCCACAGGAAGGGGCTCTGTGACATCACAGGTAGGGGCAGTGTGAAGTCACAGGAAGGGGCTGTGGGAAGTCACA | 427 |
| 4988-R4-1 | 14q24.3 | CTTTTTCTCTCTGCTGGGAAACCTTGCTTGACTTCATGTCCAGTGTTTGGTATCCAAAGACGGGGAGGAGGAG | 428 |
| 5006-L3-1 | 07q32.1 | GGAGCCAGCAGAGGGAGCTGTCGTCCCAGAACTTTCTTAGAGCTGCTAAGAAATTCTGATTTTGAAAAAGATCTTCCTAGGCTCC | 429 |
| 5080-R3-1 | 11q23.3 | GGCGTTTCTTCTTGTGTTTCCTCTTCTCCTTTTCTGGAGAGGGATGAAGGAGACCCTTTGCAAGAGGCATGTT | 430 |
| 5192-L3-2 | 05q34 | GTCTTTGCTGATATAGAGGAAGGAAGGGGAAAAATGAGCGCATTAGTTCTCTTTTATTAAAAGAGTTATTTCAGCATGAC | 431 |
| 5192-L3-1 | | | |
| 5342-L3-1 | 08p21.2 | TGGAAGGAGAGCAGCGGCATTTGGTTTGGTGGTGGGCAGATTTTCTTTTACGACTGCTAAATGCCTGCCTTTCTCCCCA | 432 |
| 5521-L2-1 | 05q31.3 | AGAGGGTGTGCTCTGGGGAGGGCCCACCCAAGACAGACCTCATGGCCTTCAGTCCCAGCCTTCCTCAGGGTCCATCCTCT | 433 |
| 5554-R2-1 | 01p34.3 | CCCCACCAACCACCAGTGCTCAGGACTTCTGCAAATCCCATTCGGATCTGGGAGCAGCTGATGAGGGGGTGGGG | 434 |
| 5638-R2-1 | 06q23.2 | GGCTTTGCCCTTTTCGGTGACACAGGCTGTTGCTATTCCAAGCAGCCTATCACAGGCAGGGGGAGGGCC | 435 |
| 5640-L3-1 | 01p34.1 | TCTCGAGAGGGGCAGGCACGGTGTTCCATGGCAAGACGGCGGTTGATGTATAGGCGTGGCATGAAGCTGGGCTTGCTGCTCTC | 436 |
| | | AGA | |
| 5726-L3-1 | 03p14.3 | CAAGGGCACAGTGAGAAGATATTTTATTACCCGTGTATTTATTTATGGGTTTTGGGGGTTTTAAAACTGGCAATTAAAACCTTG | 437 |
| 5782-L3-1 | 05q35.1 | GGGGGAAGGGGCTGGAATCATCGTGGGTTGGAACAGTTAAAGGAACCTCTGTTCAGCCCCAGCCCCAAGGCTCCC | 438 |
| 5795-R1-1 | 10q26.3 | CTCTCTACCACCAAAATAAATTCAATTACTAACTTTGAGTAATTGCGGGTAATTTATTTCTTGGAGGGCAGAGAG | 439 |
| 5836-R3-2 | 11q23.3 | GCCATGGGCCTCCATAGTTTCCTGTAGCCCCCTTGGTTCCCAAGAATAGTTTTGGAATGGGGCGTGCTGTGATAATGGGGGTTAA | 440 |
| | | TGGT | |
| 5854-R3-1 | 11p14.1 | GCCCTCCCTCCCACCGCACTTACACCTGAACTTGTCTCCAGCACTGCGGACACCCGGGTGACACATTCTTTCGGAGAGGGAGGGC | 441 |
| 5971-R3-1 | 01q24.1 | TGCCATCTGCTCTGAAGCCTCCCAAGCTGGGCCTCCCCTCCCACTTCTGGAGCCCAGGAACAGATGTGGGAGGCTGAGCAGGCA | 442 |
| 6008-R1-1 | 04p15 | CGACTTTATCACCCATCGGTTATCTGTGTCGCCTGAAGGAACTCCGGGTAAGGTACAGGAAAAAGGTGGGGGTATTGTTG | 443 |
| 6016-R2-1 | 01q23.3 | TTTCTGTATATGTTTCTGGAGTCCTGAGCCTGAGCTAAACAAAAGCAGGAGGCTGACGGGGCTGCTGGAGTTTGCAGAGA | 444 |
| 6037-R3-2 | 16q22.1 | GCAGGATCCCTCTTTTCATCTGAAAATTACCACTAATTTGCAATTAGTTGGAGGAAAATTGGAGATGGAGGAAAGGGAATTGC | 445 |
| 6096-R3-1 | 03q29 | GCCATTTGGTACCTGATGTGATCGGGCTTTTTCCTGTCGTGTGAAAAAACGGGGCAGGATTAAAACATAAGGGAAAGGTGGT | 446 |
| 6183-R3-1 | 12q21.33 | GATTCATCTATTCTTTTTCTCCTTCTTCAAAGATAACTCTGTAAGCACTTAAGGAGGGGAAAGTCATTAAGAAAAGTGGAATC | 447 |
| 6192-L3-1 | 11q25 | GTGCTGGGTGGGTGGTTTTTTATCTTCACGGATTTATGGAGTCCTTAAAACATCTGTTCCGTTCTGATTCCCCCGCTCAGTAC | 448 |
| 6233-L3-1 | 06q16.1 | GGAAATGGGAGAAGGATAAAGTGGAAATCTAATTTTGAGAAATAAGGATTAAAGGTTCCATTATTCATGCTGTTTTC | 449 |
| 6235-R3-1 | 15q26.2 | TCTGTTTTTATCAGTTTAATATATGATACATCTTCTATCCAAGGACAATATATTAAATGGATTTTTGGAGCAGA | 450 |
| 6287-L3-2 | 01p34.1 | AGCAGCCAGGTGAGCCCCGAAAGGTGGGGCGGGGCAGGGGCGCTCCCAGCCCCACCCCGGGATCTGGTGACGCT | 451 |
| 6409-L3-1 | 11q13.1 | GTTCCAGAAGGCGGCGCGTGCGGTTGGGAACGCGGAGCGGACGGATTCGATTCAACGGGGTTCCGGACCGCGCTGCGCTATG | 452 |
| | | GAGC | |
| 6434-R3-1 | 15q25.2 | GTGGGCTGCATGTTCCCGCATTGCTGGTGAGGGTGCACGATCTGGCACTGCAGCTGGCTGGTGGGAGGGCTGCATCCTAC | 453 |
| 6484-R3-2 | 12q21.32 | ACTGCTTAGCACTCCTCCACTTGCGAATGCACTTAAGACAGTAGGTGTGGTTGCAGTTGGAGAGGATCCCGAAGCGGT | 454 |
| 6490-R4-1 | 01q22 | TCCTTCCCCCTTCGTGGCTTGCGGTCTCTCTTCCCCGCCTCGGCCCCCAGGAAGTGTGAGTGCTGGGGGTGGTGAGGTTAGGAGGGGGAAGCGTCATATG | 455 |
| | | GGGGATGGGG | |
| 6496-R3-1 | 05q31.1 | CTCCCTCAGGCCCCGCCTGCACCTTTCCCAGCCCCCAGGACTCTAGGGGAAGTGGTGGGTGGGGGAGGGGG | 456 |
| 6584-L1-1 | 12q24.23 | GCTTGGTGAGAGGAGGAGGAGGCAGGGCCGACCGCCACCCGCCTGTCTGCCATCTGGTCCCCTTCCCCTCCCTCCTCTCATTGC | 457 |
| 6602-R3-2 | 03p13 | CAGAGTCTAAATGGAAGAGTCCTCCGTATTTACCCAGCTCATCTCCTGTGTAATGGATTTGGAGGAGAGATTTCCACTGGGGCTCTG | 458 |
| 6642-R3-1 | 14q11.2 | ACACTCTCCTCTTGTCTCCTTGTAATCAATTCATTGTCATCAGAAATGTGTGACACCTCGAGGGGAGGGGAGGACGTGT | 459 |
| 6681-R2-1 | 11q12.2 | TGTGCTCTCATTGTTATTCCAAAAGTCTCTGTCTAGATCACTGGAGGGGCAGAGAGAGAGGGGAGAAAACAGGGAGATACA | 460 |
| 6683-R3-1 | 12q23.2 | GTTCTAGTTCCAGGATGCTGATACTTTAAGCCCGAGGCTCTAACTTGAGCAGGAAGAGTTTATTTTGGGATGAAGAAT | 461 |
| 6752-R1-1 | Xq13.1 | CCCTCCCAGTTCCCATAGCAACTGGGCTGTAGCAGCCAGAACTTGATTGAGCCCAGCAGTGGCCCGACTGAGGTGGGGAAAGG | 462 |
| | | AGGG | |
| 6795-R4-1 | 06p12.2 | GGGCCAGCGAGGAGGCACTTGCCGAAACCACACACTTCCTTACATTCCATAGCAAAGTAATCCATATGGGGATATAAAGAAGCATGTGGCCTCGGGAA | 463 |
| | | GCAGTGTC | |
| 6803-R3-1 | 22q12.3 | GCCACCTTTCATGGTGAGGATGCCTGCCACCTTCAGGATCACATCTTTGGGTGAGGTCCAACCAGAGAGGGAGC | 464 |
| 6839-L3-1 | 03p21.31 | AGGGGTGGGGGTGGCAGGGCCCAGCGGGCTGGCAGGCAAACCCTGGTTTTGGCCCAGGGACCTATAATCAGCTCCTGCCCCT | 465 |
| 6880-L3-2 | 01q42.13 | GGCTTGCAGAATGTGGATGTCTTCGCGGGGGAGGTGGCCACGTTCTCCTGTGAGGTGTCTCACGCGGGTGGGCC | 466 |
| 6906-L3-1 | 06p21.1 | CCAGGAGAGCTGGCTGGTTGGGGAGAAGACACTAACCCTGTGAGTCTGACCTCAGCCAGCTAACCTGCCCTGG | 467 |
| 6930-R3-1 | 09p21 | TGTCATTTGTCCATTTTCTCTTCTGACCCAGTGGTATTCTGCAAGATCAGAGGGGAGAGAAGGATTAATGTCA | 468 |
| 6984-R4-1 | 01q22 | CCCCACTCCCTTGCAGGCTGCAGGCACTAGGGCTCTCAGGAATTGCAGGGACTTTGGTGCCCAAGCAAATGCTTGGGCAGGGGG | 469 |
| 7026-L3-2 | 15q15.3 | TCGTTCCCGGATCTGGTGGGTGAGGTTTTCGATCAGGGCAAATACCTGATCACAGACCTTCACAGGATTCTGGATGA | 470 |
| 7061-R3-1 | 01p13 | TCATGGCAGCGACCCACCTCCAGTCCCCTGGACAATCGGGTACAAGAGACTTAAGGTTGGGCATGGGAAGGGTGGGGTTTCCATGA | 471 |
| 7066-R4-1 | 15q23 | CAAGGTCTTTGGTCTTGGAGGAAGGTGTGCTACTGGAAGAGGCCACCGAGGCAGGGCTGGTGGGGGCATCTTTTTTCAGGCTAC | 472 |
| | | GGGCCTTG | |
| 7126-L3-1 | 05q31.1 | CAGGGGCGCGGGCCGGAGAGCGGGTGTGCAAAGTGGGCGCAGGGCCCTGGGGCCGCGCCCCTTGCTCTGCCGGCTCGACTC | 473 |
| | | TTG | |
| 7182-L4-1 | 12q13.3 | GGGGGCAGGGGAAGGTGACGGAAACGGCTAGTTACCCAGAATTCTCTGGGGGAACCAGAAAAATCGGTTATCTAGAATTCTCCC | 474 |
| 7192-R4-1 | 09q33.1 | TGTAGCAAATCCCATCCATCTGTTTGGCTGCTCTTGCCTCAGTGACAGTGCCAAGAGCCCAGGCAGACTTAGAGGGGGAAGTGC | 475 |
| | | TTTGCA | |
| 7292-L3-2 | 01p34.1 | GCAATTAGAATGCAGGGAGGTTCAGAAGCTATTTAACTGGGTGACCCCTGAGGTCGCTGCATCTGACTCCCATCCCTGGATAAAT | 476 |
| | | ATTGT | |
| 7352-R3-2 | 01q25.2 | GCCTCTGTGCGCATGGATATAATCAGCTTTGATAGGCAGAGGCTGAGGCTGTTTTTCCAATTAGAGCTGTTAGAGGATTCTGGCA | 477 |
| | | GGGGC | |
| 7356-L2-1 | 08q24.3 | GGGGGCGAGGCTATGTCGCGGTGGCAGCCCGGATGGGCCGGCAGGGCCGGGAGTAACGGGACGTCGCCGCGGAGCTTCTTC | 478 |
| 7356-R2-1 | | CCCC | |
| 7367-L1-1 | 06p21.33 | CGGTCCCCAGAGGGGGCAGCTCTAACCCTAAACAAGTGCTCAACCCTTGAATGGGCCTGGATGGCTCCCCTGGGGACTG | 479 |
| 7384-R3-1 | 12q12 | GGCATTTCTTCTTGTGTTTCCTCTTCTCCTCTTCTGGGGAGGGATGAAGGAGATCCTTTGCGAGAGGCATGTT | 480 |
| 7411-R3-2 | 18q22.3 | GAGTGTGAACTGGCTCCAGCTGTGACAATAAAACAGCAGGTGGCTGCTGTCATTAGGGGTGGCAGATGAGGCAGGGGACTAACA | 481 |
| | | TTC | |
| 7421-R2-1 | 12p13.31 | TGAAGAATTTCTTCTGGATGACTGACCAAGAGGCTATTCAAGATCTCTGGCAGTGGAGGAAGTCTCTTTA | 482 |
| 7426-L3-1 | 02q22.3 | AAATCAAGCACAGCAGGAGGTGTTCGTCTCCCAGGTAATGGGTAAATGATGAGCAGATGAGCCATCCTTCTATTGATTT | 483 |
| 7569-L3-1 | 11q23.3 | GGCCTGTCTTGGGGGTAGCTTTGTGGCCTGAAAACAAATCATCCTTCACAGCTTGCTCCCAAGTCCAATAAGCC | 484 |
| 7571-L1-1 | 02p21 | CTTAGGGGTGGGGGAGCCCTGTTAGCCCTGTAAATAAAGTTTAACGAGGTGAACAATGGCTGGCTCTGTCCCTGAG | 485 |
| 7572-R2-1 | 11q12.1 | ATCACCTTTCCCCCTCCCATGTGCTTTCCTTCATTTGAGATCTTTTGACCTTTGGCTTTATTTGGGAGGGGGAAGGGTGAT | 486 |
| 7578-L3-1 | 02q12.1 | GAGGGGCTGTAGCTCAGGGTGTGCACTGCGAGGCTGGACCTGTTGAGTCTGCAGTGGACATCCATTTAGCTTCAGGTTGTC | 487 |
| 7660-L2-1 | 19q13.32 | GAGCTTTATCGCTCGGGCCAGGCGGAGGCCGGGCGGCCCCGTGGCTTCCGGAGGCGCCCGGGCGGGATGAGCTC | 488 |
| 7702-L2-1 | 10q21.3 | GGGGCGGGGAGGAATTCCGGTTCTCTGGGACTTTCCAAAAAAGGCGAAGATCCGGTGCCGGCGGCTCCGCCTCCCTAGCCCT | 489 |
| 7726-R3-2 | 12p13.32 | CATTTCACATCCATGAAGTAGGAATTGGGGCTCTGCACCAGGCGTTTCTTCTTGTGTTTCCTCTTCTCCTCTTCTGGAGAGGGATG | 490 |
| 7764-R3-2 | 05q11.2 | TGCTATCTCGCCTCACACATCAACACACGTGCCAGACAGATTCTGACTGCAAAGTCTGTTATTGGTGATGAGAGAGGCAGAGAGG | 491 |
| | | GCA | |
| 8004-R3-2 | Xq28 | GGGGCTGCCATCCTGCTGTCCGTCATCTGTGTGGTGCTGGTCACGGCCTTCAATGACTGGAGCAAGGAGAAGCAGTTCC | 492 |
| 8016-L3-1 | 12q21.1 | AGAGGGGTGACTGCGGGGCTTGTTGCGCTGAAGATTTACAATGTACTTCTTGCAGGCGGCTCAGCAACCCCCTCT | 493 |
| 8077-R3-1 | Xq22.3 | CCAATTCTCACTTAGGTGTTAGGGATTTAATGATACTCCTCTGAAGAGTATTTTTACTACCTGAGGGTGGGGAATGG | 494 |
| 8169-L3-1 | 06q16.1 | CATGTGGGGAGGTAAATAATCATTTCTGTTATGTCAGTGGAAAATTTTCTGGAGATCATAAAGAAATCAGTTTACCCTGAAGCATG | 495 |
| 8250-R3-1 | 09p11.2 | CGGAGCCGCCCGCGCCAGCCTCTCCATCTCGCAAGTTTTAATTAACGCTGAGGGAGAGGCGGCTGACGGGCGGGTCGG | 496 |
| 8263-R3-1 | Xq25.1 | ACAGACATCCAGTCTAATTACAGGTGTCTTTTTAACCAGTGAGAGGAAACTGGGGGAAGATAGATTCTTGTTTTTAATCTGCTATCT | 497 |
| | | GT | |
| 8281-L3-1 | 11q13.4 | CCAGCCCTCAGCTGCAGCTGGGGAGGGGCTGAAGGGTAGGGAGCCCTATCCCACCTGCATCAGAGGCCTGG | 498 |
| 8316-R3-1 | 14q24.3 | GTCAGGCTGCTGTATTCTCTTACACAGATGCCAGTAAGAACAAAGGCATCACGTGGGGAGAGGATACCCTGAT | 499 |
| 8394-L3-1 | 07p13 | GGGGCCAGGGATAGTCGGAGATGGGCAGGGCGGGGGCCCCACTGGCGAGGGGCCCTCGGCTTCTGGGGTCCCTGAGCCCC | 500 |
| 8433-L3-1 | 17q25.3 | CGGTGGAGGGAAAGGGGAAAGGAGCCATTTTCTGCTGCACATCAGTCAGTGCCTGCGCCCTCCCTCCCTCCGCCG | 501 |
| 8564-L3-1 | 05q13.2 | AGGGGGTGGGAGGTCTGTTTGGCAACTGGGGTGAAGGGATTGCCCTTCCCCTGCTGGGATTCCCCCAGCCCCT | 502 |
| 10010-R2-2 | 17q23.3 | CCGGGCGCCCCCGAGAGCCGGCCCTCCCTTCCTCCGTGACAGGTGGGCCTGGAGTTGGGGAAAGTTTGGAGCCGGCGAGGGG | 503 |
| 8587-R2-2 | | CGCCGGG | |
| 8587-R2-1 | | | |
| 8724-R3-1 | 15q23 | GGCCCAGAAGATGAAAAGCTGAAGTCCTTTCCCTTCCAGCTGAAGCCAGGTGTGATGCTGGCAGGGAGAGGTTCCAAGCTTGGC | 504 |
| 8731-R3-1 | Xq13.1 | GTCAAAACTGGTTTTCCCTGCCCTAACCCAGGCGCCTTTGTTAAGGGCCTGGCAGGATGGGGCATGAATGAGGGTGAC | 505 |
| 8808-R3-1 | 03p14.3 | CCGATTATGGCTTTCTTCTCCTGCCCTTTCAGTAGTGATTTGCAGAAACAGGCTGGGAGAAAGGGGTCTTTGG | 506 |
| 8898-R3-1 | 17p13.3 | GGCGCTGTCGGCCGGGGCGGCCGCCGGCAACTCGTCCGTCTTGATAACCATGGTGGCGGGAGCGGGCGTCCGCCTCGGCTGT | 507 |
| 9989-L3-1 | | CCGCGCC | |
| 9021-L4-1 | 10q23.1 | GATGGTGTGGGGAGCTTGGGTGTTTGTTTCCCATTTCACAAAACAAAGCAGCCAACCTTACATTCATC | 508 |
| 9053-R3-1 | Xq27.3 | GGAAGGGCACTGTCTCTCTGATTCCCAGGGCCTGTCATTTCCCGAGGGCTGGTGGAGCCCGGGGATTGGAGGGCAAGAAGCCC | 509 |
| 9053-L3-1 | | AGCC | |
| 9068-R2-1 | 14q24.3 | GTCTGCCTCTTTCTCTGCAGTAATTGCTTCCTGACATTTGTTTATTTTAATTAGGAGAGCAGTCTTGATCAAGAGGGAGGGCAGAC | 510 |
| 9087-L4-1 | 03p13 | AGGAAGGGAATGGACTGGGAGGGTTTCTTTTCCTGATGGAAAGCCTATTTTTCTTATTGTGTTCCTTTTCT | 511 |
| 9217-L3-1 | 02q31.2 | TCCACTGTTGGCTTTAGTCACGGCGGGGATCGTCAGTTTAGCGCGGCCATCGCTAAAGGAGATCTGCACGCCGGGCAGAGTGGA | 512 |
| | | AGTGGA | |
| 9245-R2-1 | 05q21.1 | AGCCTAAATACATTAGCGAGCTGGTAAAGCTTTTAAGGCCTTCTTGGGAGCGAGTGGCTGGCTAATGAGAGGTT | 513 |
| 9287-L4-1 | 17q21.1 | TGCATGTGTGGGCTGGGGAGGGCTCTGAATATCTCCTGGAACGGTACCCAGAGCCCTGTGGCTCTGCGCATGCG | 514 |
| 9347-L2-1 | 06q15 | TCTTTGTTAAAATGTAAAATGCATATTGGGCAAATGCTCCAGGGCAATTTGCATAAAAAGTGATGACAAAGA | 515 |
| 9349-R3-1 | 21q22.11 | GGACACTCTGAACCCCAAGTGGAATTCCAACTGCCAGTTCTTCATCCGAGACCTGGAGCAGGAAGTCCTCTGCATCACTGTGTTC | 516 |
| 9387-R2-2 | 03p21.2 | TCTCCATCCTCTGTCTCCCTTGATCCTCTGTTCTCCCTGATGGCTTTGAGATGAAGGCGACGGCAAGGATGGAGG | 517 |
| 9391-R3-1 | 02p14 | TAGCTGCCTCAGAGTAGAAAATAAAACTCAACAAGATTTTATCTTGTTTTTAATTTCTATGTCTCCCTGGCAGCTG | 518 |
| 9507-L3-2 | 16q22.3 | GGTGTTTGGATGGATGAGGATGGTGGATGATGGATGAGGGAGACGGAGGATTCCCTTATTAAAGCATCAAATTCTTCCCTAAATA | 519 |
| | | TC | |
| 9564-R1-1 | 09q33.2 | GGCGCCCGCCGGGCTGTCCGGAGCGGCCGATGGGGCCCGTGTGAGCGCGCCCAGGCCCGGCCCGGTGCCCGGCGGGCGGC | 520 |
| 9594-R2-1 | 02q12.1 | TTCCAGCTATTTAGTAACTCTTCCAAAACACTGTCAGCACCCATGCTAGGATGCAGGGAGTGGGAAGGAAGTCTAAGTAGGGAA | 521 |
| 9656-R3-1 | 03q25.33 | GTCCTTTAAGACAGTGGTTCTAAAAATGTGAGCCGAGGATCTTTTGGCTTGCAGCATTAATCTCCACAGTATGTACTTTAAGGGC | 522 |
| 9691-L4-1 | 14q24.3 | GCAAGGGGCCAAGAGGGAGATGCGGATGAAATGGATGATTTAATGGGTCATCTCTCCTGTAGTTAATTTCTCTAGATCTCTTGT | 523 |
| 9733-L3-1 | 15q23 | AGGGGTGGGGAAGTCTGGTGAGGGACAGCCTTGAGTCAAAGGATGGTCACCGCTCCATGTGGCTGCCCCACCCCT | 524 |
| 9774-R2-2 | 13q13.3 | GCTTGTCCTAAAAGATCTTCCTTCTGTTTCCCTGGGTTTATCCACTTGGTTGGCCTGATGGGAGCAGGAGGCGGTGAGGGGGCG | 525 |
| | | GGC | |
| 9816-R2-1 | 17q12 | CTGGCCCATTTTCATTCTGCATAAAATTTTAATGGTCTCTCTGGCTGATCCGGGACGGCAGCGCGCGGAGAGGCTCTTAAAGGGC | 526 |
| | | CAG | |
| 9840-L3-2 | 05q14.1 | CTTGTATTTGTTGACATCCTGATTTATAAAAACCTGAACAAGTTCAGTTTCAATAATTCTTTTTGTTCAAGGAACACAAG | 527 |
| 10010-R2-2 | 07q32.1 | CCGGGCGCCCCCGAGAGCCGGCCCTCCCTTCCTCCGTGACAGGTGGGCCTGGAGTTGGGGAAAGTTTGGAGCCGGCGAGGGG | 528 |
| 10010-R2-1 | | CGCCGGG | |
| 10030-R3-1 | 10q24.1 | GGATGCAACCGTGGAAGCCGGTGCCGTTGAGGATCTGCCACAGGCGGAAGGCAGCTGAGTTGACATCCACGGGCATCC | 529 |
| 10138-L2-1 | 17q22 | ACTTTTTCTGGTGGGAGGGGAGAGCGGAGCAGGCTCACGTGTAACCGCGCAGGAGCCTCCTCTGGCTTGAGCCCTTTCTTGGTA | 530 |
| | | AGT | |
| 10145-L2-1 | 05p15.33 | GGTCCAGATAACAGAAGAGAGAGCAAAGGAAAAAGAATTTTTTGAAGATCAAAAGTGGCTGTTCATTTTGTTATCTGACC | 531 |
| 10175-L1-1 | Xq13.2 | CATCTTTGTGGCTCCTGGTTGCTAGGAGCAGGTGCTTCTGTTACTAAGCAACAGGAGCCTGTTGGATG | 532 |
| 10209-L3-1 | 02q33.1 | TCAATTTGTTACATAGCTAACTTATTTTCTAATAGACTATGTTGGTAATAAGAAAATGAATTACATGCTGTTGGCAGAGTGA | 533 |
| 10231-L3-1 | 09p11.2 | GGCGGCTGCGGAGGCTGGCGCGGGCTGCTGCACCTTTAACGCTTTCTGGCGCTGACAGGCGGCGGCCCAGCTAAAGTTCACAG | 534 |
| 10231-R3-1 | | CGCC | |
| 10242-R3-1 | 22q13.2 | GGCAGGAAGGCCTCCGGCTTCACAAAGTGGCCCTGGGCATCCAGGAAGTGTTCGGGGTGGAAGCGGAAGGGCTTCTTCC | 535 |
| 10333-L3-1 | 11q12.2 | CGGGGCAGGGGAGGGGGTGGGCAGGGCACAAGCCTCCCACTGTGCCGTGTCCCCACCCTCCCCCGTTCCCCG | 536 |
| 10335-L3-1 | 15q26.1 | TCTTAGTGCTTTCTAATTAAAAAGGAGGGGAGTGGTGATCTTTTTGCTCTCTAAGTTCTGTTTCCTCTGAGTGGAAAGCAGAGGG | 537 |
| 10342-R2-2 | 19q12 | CCCACGCACGGAGGGTCGCCAGGAAAGTGGACATTACCGCTTTAATTAACTTCGAGATGCTCCGGCGGCGGG | 538 |
| 10342-L2-1 | | | |
| 10366-R3-2 | Xq22.3 | GAATACCATTAATCTGTTCACTAGGAGATTAATTTGCAATTTGTTGGCAAATCACATGTGGGTCTTGTAGCAAGAGCGTGGGTGGT | 539 |
| | | GTTT | |
| 10374-R3-2 | 16q12.1 | CAGGGGATTTGTTACCGCTGATGTGTGGCCCGTCCGAATGAAGGGGGCTTTTCATTAACAAAGTAGCGGGCGGTGTCATCTTCC | 540 |
| | | CCTG | |
| 10533-R3-1 | 20q12 | TAATTGCCTGAATCGCCGGGTTACATATCTGTTAGGAAATCTCTTGGCAATATAAAGAAGGGGCTCAGGACAGTTA | 541 |
| 11370-L4-1 | 12q13.3 | GTCCAGTTCTCAGGGGACAATACTGATGGCAGCCAAACTGGGCAAGGATGCAGTGTGGGGGCGGAGGGGGCATGACCTCTATT | 542 |
| | | CAAGTTCTGTGTCTTGGCCCCTGGCTGAGGTATTGAGTGTGAGGAAGGGAACACTGGGC | |
| 12184-L4-1 | 03p13 | TTGTACACAATATTCGTCTGTGGTTGAAAGGGGGCACGCTGAGGTCAAGTGATGTAGTGTTTTCCATTTTTCCATATGAGTCTCAC | 543 |
| | | AGTGTGCGA | |
| 12223-L4-1 | 04q27 | TAGAGGGAGAAGAAACAACTCTGTCTGATGTCTTCTGGGATGGCCTTAATACAGATAGCATTGTCTCTTCCATTTCTG | 544 |
| 4315_C-L4-1 | 01q22 | GGGGAGGGGACCGGGAGGGCCGGGCGGCCGCGACCCCCAACCTCTCGGAGGAGGGGCTGCCGCTCGCCGCTCCGCTCTTTG | 545 |
| | | TTGTTTGGGGCTCCGCGCCTCCCCCTCTCTCCCTCCTC | |
| 4315_D-R4-1 | 01q22 | GGGGACGTGGCCCCTCCCCCCCGGAGCGGGACTCCAAGAACTCCGGGGGGCGCTGGGGGCTGACTTTCC | 546 |
| 4315_E-R4-1 | 01q22 | TCCCCGCCACCCTTGGAGCACCTCAGCGTTCTTAGGGGAAGCCAGAGCCGGGGAGGATGCGGGAATAGGTTTGGTGGGGG | 547 |
| 4315_F-R4-1 | 01q22 | GATCAGGTTCCCCTCCCCCGCATACACCTGGGCGCAGGTGAAAGCTCAGGGAGCGGGTGGGGGAGCCCGGGTT | 548 |
| 4315_I-L4-1 | 01q22 | CTGGGACGGGCGGGGCGCCGAGGCCCAGGGCGCCTGAGGGGCGCAGAGGTGTCAGCGTGCAACCGCCGCCCCCCAGCGTTC | 549 |
| | | CCGCCACCACCGCCACCACCCTCAAAGCCCGG | |
| 4315_K-L4-1 | 01q22 | CCGGGGCTGGGGGTGGAGGATGGCGAGGATTTGACAAGTTCAGGGCCCCCTGGGATCCTTTCCCTACTCCCTGGTCTTGTTGG | 550 |
| | | ACACCCTGTTTACCTGCCCTAATTGCCCCGG | |
| 10010_B-L4-1 | 07q32.1 | GGGCAGCGCCCCTCCTTCCGGAGGGCAGCATCCCGGCGGGGGCGGGGGCTCGGCTTTGATGCCAGGGCACCTTTTGTCCCTG | 551 |
| | | GAGACGCTCTGCCAGCCAGGTGCGTGGAGGGAGTGCAGCCC | |
| 10010_D-L4-1 | 07q32.1 | CAGGTGAGAGGCTGAGCCCCGGGCGGGGGAGGGCGCCAGGCCTGGGGCATTAACCGTCCCGGGGACCCTTTTGGCCTG | 552 |
| 7356_A-R4-1 | 08q24.3 | CGGAGGTCGCTCGCTCGCTCGCTCGGCTCGCTGACTCGCCGGAGCGCTCTGTGGCGGTCGGCGGCAGGTCGGTCGCGAGAGC | 553 |
| | | GGGCTCTG | |
| 12722-L4-1 | 13q31.3 | GCGGGCGGGCGGGGAGGTCGGAAGTACTTTGTTTTTTATGCTAATGAGGGAGTGGGGCTTGTCCGTATTTACGTTGAGGCGGGA | 554 |
| | | GCCGCCGCCCTTCATTCACCCACATGGTCCTTCGAGGTGCCGCCGCCGCCGCCCGACCTGC | |
| 999999-R4-1 | 17q25.3 | CCCTTTGCACCTCCCGGGATTGGGCGGTCAGGGCCAGGGCCCCTTGAGAGTCTGGGAATCCCTTCTCTGGGCCTCGCTGGGGT | 555 |
| | | CCTGGCCAGGAAGGGGCTGGGGGTGACAAGGGG | |
| 999997-R4-1 | 17q25.3 | TCTTCCTCCACCCTGCCCCACCCCTAGGTCTCTTTATTGATTCAAAGGTTAAGGAAGCTCCTGGGGGCTTGAGGGGGTGGCACAG | 556 |
| | | TTTTGGTGGGGCCCAGTGAGGA | |
| 8433_B-L4-1 | 17q25.3 | ACGGGCGAGCAAACCCCAAATACTCAGCAACACAAAAATATGCCTCCGTGTGTGTGTGTGAGTGTGCGTGTGCCTGCGCGT | 557 |
| 8433_C-R4-1 | 17q25.3 | AAATTAAAGAAAAAAAATTCTCCACCAAAAGCGCCGCAGTGACAGTTCCCAACATTTTCTGCCTTTCTTCTTCCCCTCCCTGCACCA | 558 |
| | | CTAGGAGGGAGAAGGCACACAATTGCATTTTCGTCGCTTTTTAATTTTTTTTTTTTGGTTT | |
| 8433_D-R4-1 | 17q25.3 | CCCGGCTCGGCCCCGCGTCTCTCCAGCTCCTCCGGCTCCTTTTAGTGCATAAATTAGTGATGGCATTTCCCGGAGAGCGGAGCA | 559 |
| | | CAACACAGGGCGCCGGGCTCGGG | |
| 3758-R2-2 | 18q21.31 | TGCAGGAAAATCAGTAACATTAGTCATCTTAAAAGGGTTATTACTCAAGATGATTTAAATTGTGAAAATGTCAGTGGAGCCTGCA | 560 |
| 3820-R3-1 | 16p11.2 | GGCCTTCACCCGGGCAGCCACCTTGTCTCCAGGTCTGGCCACGTAGTCTCCTGAGGCAGGGATGGCCCCACAGAGGGGTGGGG | 561 |
| | | GCC | |
| 3851-R3-4 | 16q21 | ATGGAGATTTCTAGCCCTTCTAAAGTCTATTAAAAACCTTTAAATTCTGCTTTAGACAAAACATAAAGGAGGGTTGGGAGCTCTGT | 562 |
| 3874-L3-1 | 07q35 | TGGGGTGGCAGGTATTAGGGATAATATTCATTTAGCTTTCTGAGCTTTCTGGGGAGACTTGGTGACCATGCCAGCTCCA | 563 |
| 3906-L3-1 | 03p24.3 | AGCTACACCAGAATGAGGAATAAAGGGGTTTACATATGTTCCAATTCTAAACCTATCAATCAAACCCATGTTATTCCTTTGGGAGCT | 564 |
| 3952-L3-2 | 01p36.32 | CCCCGGCGAGGGGTGTCAGATTGAGTGCTCTGTGCGCATGTGCGAAGGTGTCCAAACTGACAATGCTGGGG | 565 |
| 3976-L2-2 | 14q11.1 | GTCCACCTTCCAGCAGATGTGGATCAGCAAGCAGGAGTATGATGAGTCAGGCCCCTCCATTGTCCACCGCAAATGCTTCTAGGTG | 566 |
| | | GAC | |
| 4064-R3-1 | 11q23.3 | ACATGGCTGAACAAGATAAGGGTTTTATTCTTGTGTTAGGGACGTGCTGGGGCTGGGATGGAATTCAGCTATGT | 567 |
| 4118-L2-2 | 02q21.1 | GTCCACCTTCCAGCAGATGTGGATCAGCAAGCAGGAGTATGATGAGTCAGGCCCCTCCATTGTCCACCGCAAATGCTTCTAGGTG | 568 |
| | | GAC | |
| 4130-L3-1 | 17p11.2 | GGGTGCTGGTGGACATGGACGGCGTGCTGGCTGACTTCGAGGGCGGATTCCTCAGGAAGTTCCGCGCGCGCTTTCCCGACCAG | 569 |
| | | CCCT | |
| 4155-R1-1 | 03p12.3 | TGACGACTGGCCCCGCCTCTTCCTCTCGGTCCCATATTGAACTCGAGTTGGAAGAGGCGAGTCCGGTCTCA | 570 |
| 4182-R2-2 | 02q23.3 | AGTTCTTGTAGTCCACATCGCTGACTAAGGTCTGGCACTTCTTGGCCAGCACCACCCCCAGCATGTCCACTGGGCTGCTGAACT | 571 |
| 4216-R3-1 | 04q24 | TCCTTCCAACCCAAATGATTATATGATTAAGATACCAGTACCCAGGGGGAATTGATCTGTGTATAAGGGAGGGAAGAGA | 572 |
| 4340-R3-1 | 10q22.1 | GCTCTGCTTCCAGGCTGTATTTTTAGGCTGGCATTTAGGTTTGGCCTGGGGACAAGGGGCTGGAAAATGCAAGGC | 573 |
| 4391-R2-1 | Xp11.3 | TAAGCCAGATTCTCAACTTACGTAATTCTATGGGAATTCACAGAGTTATATTGGTTGAGAATTTGGCTTA | 574 |
| 4413-L3-1 | 11q23.2 | ATTTGTTTACTGTAGCTGGAGGTGCCGAGTAATGAAATGCACTTGTGTCTGCAGCTCACTGCTAAACAAAT | 575 |
| 4417-R1-1 | 14q13.2 | GCTGGGGTTCATCGGAGAAACTCCCTGCGATGAGCCACTAGGGTCACGGACAGGGAACTTTTTGATGAGCGCCGAGT | 576 |
| 4498-L3-2 | 06p22.2 | TTCCCCAGGCAGCAGCAGGCGCACGGCCGTCTGGATCTCCCTGGAGGTGATGGTCGAGCGCTTGTCATAATGCGCCAGGCGGGA | 577 |
| 4567-L1-1 | Xq26.2 | GGGAGTGTGCTGGGAACTGGGCAGATAAAAAGGGCTGGAACTTATTATTTGGCTAGACTCTCAATTCCC | 578 |
| 4579-L3-2 | 06q14.1 | AGCACAGCTATTGGTGTTTTGCAGGAGGCAAGTGAAGCCCATCTGGTTGGCCTTTTTGAAGACACCAAATTGTGTGCT | 579 |
| 4610-R3-1 | 08p12 | GCCCAGTTAATTGGTCTCTCAACCTACATTAGCTGTTGCATTGCAGCCAATTAGGCAGGGGCCAGAGGGC | 580 |
| 4724-L3-2 | 15q24.2 | ACAGACCAGGCACAGAAAGCTGAAGGTGCTAGAGATGCCAAGTGAAACATGTGCATTTTTGGTAACTGTGTACTTCTGGTGACTGT | 581 |
| 4754-R3-2 | 04q25 | CCACCAACTTGACATACACAGGCTCATCACAGTTGGATGCAAGCACACAAAGATGGGCTTGGCACTTGTCTAAGGCTTTGG | 582 |
| 4801-L3-1 | 01q32.2 | ATTAATGTTTTTGTAGCAAACAGGAGGCAGAGTTCTCCAAAGGCTCTCATCTCTGTGCTTCCAGAAAATATTGAT | 583 |
| 4964-L3-2 | 02p14 | TTGGGGAATTTGGTGGGTTTTCAGAAGTTAGCCCTTCTGGTGTAGGGTTTGTTGATTTCGATACACCAGATTATACTCGTCCCAA | 584 |
| 5071-R2-1 | 17q12 | GATTCCTGCTCCCAGAGCCATAAAGTGGGAGCCCCCATTTATTAATTGGGCTGGGACTGGGGCGGGGGTC | 585 |
| 5306-L3-2 | 12q13.13 | GGACCCCTAGAAAGGGCCAGAGCTGGGGTCAGAGGCCACCTCCTCCATTCTCTGCCCTGCTCTGCTGGGTCC | 586 |
| 5327-L3-1 | 09q31.3 | GGAGACAGGACATAGTCCCAGAGGTTGAGCTGGCTTATGGAGCCCACAAAAGACTCAGCTGGGCTGAATCCCTCTCC | 587 |
| 5372-R3-2 | 10q22.2 | TGTTTCCCTGTGGAAAAGATTACTCTAGGCAAATTTTAGAAAATGCTTTTAAAAAGAATCTTGTGTAAGTTGAAAACAGAGGGAAAGA | 588 |
| 5380-R2-2 | 1p36.22 | GGCCCTGAGAGCAATACTCATATTGATTGCATTTATTTCACTCTAGGGAGGAGAGATAATTCTTCAATGTGGGACACATCTGGGAG | 589 |
| | | CC | |
| 5441-L3-2 | 1q24.1 | GTAGCTGCTGCTCTGTTAGCTATACTGACTTGGAGCTTGGCTGTAGGATCAAGTTTGGGGTGGGTAACTAGTGGGAGGCAGCTGC | 590 |
| 5474-L3-2 | 9p13.3 | GCTGAGGTAGGTGGGTCAGAGTCTGGCCAGGTGAGAGGAGGCACCCCAGTGCTTGGCCCTGACTCTGCCCCCTGGACACCTTC | 591 |
| | | TTCAGT | |
| 5513-L3-1 | 8p12 | AAGTGGCTCTGAGGCATCATGGAGAACAGTTGAAAATCACATTGTCAGCTCGAAATGCATCAAAGCTATTT | 592 |
| 5598-R2-2 | 11q13.2 | CTCCCACGGCCTGAAGCTGCTGCCAAGCTATTTTTGGTTCTGCACAGTTAAAAATAGCTTCACGGAGGTGGGAG | 593 |
| 5618-R3-1 | 8q21.11 | TCCCCCAACCCATCCATTAGGCCAGCAACGCTTGTAGAGCTCACTGTGGGCTGTAATGTGGCACTGGTGGGCTGGGACACCAGG | 594 |
| | | GA | |
| 5619-L3-1 | 15q25.3 | CTCATTGAGGGAAGATTGAGCAGAACTGGCATTGCTTGCTTTCGTCAAATTGATTGTGCCCGTCTGTTTGATCCAATTCAGTGAG | 595 |
| 5733-R3-2 | 16q22.1 | CTCTCCCAGCCCAGCCTGAGTCCTTGTGTATCGTGGAAATGGGTGGGACTGAGAAGCAGGATGAGCTGGGTGAG | 596 |
| 5735-L3-1 | 5q31.1 | CCCCCACAGGCTTGAGGCCAGAGGAAACAGCAACTTTCTTCGCTGGGAAAGTGTTGTGGGGCTCAAGCATTTGGGGG | 597 |
| 5863-L3-1 | 9p13.3 | GACATCTTCCTGGCGACAGGAATTGCCAGCAGCAACGGCCTTGGCGGTTGCCATGGTGATACCCTTGGTCATTCGGATGAAGTC | 598 |
| 5919-L3-1 | 7p21.3 | TCTAGGGAGATAAAGTGACAGTGTTGCTTGTTCAGGCTATTGTTCAAAGAAGCACGTCTTTTATTTATAGA | 599 |
| 6026-R3-1 | 18q22.3 | TTGGAGGCAGAAGCTCTGGCCCCTATGGTGGTGGAAGCCAGTACTTTGCCAAACCACAAAACCAAGGTGGCTGGGGTGGTTCCAG | 600 |
| 6218-R3-1 | 2p16.1 | TTCTATTAATATGTATCATATTGGTATCCATTTTCACTAATGTGACATGAGAGGCAGTAATGTGATTACTTTTTTAGTGGAA | 601 |
| 6253-L3-1 | 4q31.23 | GCTGGCATTATGGCAGCCAGGATATTGTCAGGAGGAACTTGGCAGTGCTCGTAGGTGTTATGATGCTGGC | 602 |
| 6355-R3-1 | 2p14 | AGCCTCCTTGTCTGGAGATTCTAACAAATGGGTTTGCAGTGTTGGAAACTGTAAATCCTCAGGGAACAGATGATCTGGACAATGTA | 603 |
| | | GCT | |
| 6421-R3-2 | 11q13.1 | CCCTCCTTGATCTGGGGAACTATTTCTTCATTCCAGAAGGTCAGAGCTCTGGCAATAGTGTCCTTCAGACTCTCACAGGAGGG | 604 |
| 6450-R3-2 | 12q13.2 | CTGCAGTGGGAAAGTCAAGCCTGGTATTACGTTTTGTCAAAGGGCAGTTCCATGAGTACCAGGAGAGCACCATTGGAG | 605 |
| 6478-R2-2 | 2q22.3 | GCTGGATTCTGCCCTTGGATACACACAACAAAACCCCCATTGAAGTCAATGGAAATTGTGCATGCATATCCAGGGGCAGAATTTG | 606 |
| | | GC | |
| 6554-L3-2 | 15q26.1 | TCCCAGAATATGGAGGCACCAAAGTAGTTCTAGATGACAAGGATTATTTCCTATTTAGAGATGGTGACATTCTTGGA | 607 |
| 6647-R2-1 | 1q23.3 | CTCAGTATCTTCAGCTTGGGAAACTGACCTCGTTAATTTTAATGAGGGGAAAAATTCTCCAGCTGGGGCTGAG | 608 |
| 6664-R2-1 | 14q31.1 | GCACATTATAAACTCTAATTCATTAACGTCATCATAAATGGTAATGTCCTGTGAAAAAGAGAGGTGGTGGC | 609 |
| 6712-L2-1 | 9q21.13 | CAGGCTGACAACTGATATCACAAGACCACAGCTAAGAGTGGTTTATTACTTTTAGTGGGATTTATTTAATTCAGTCTCACAGCCTG | 610 |
| 6718-L3-2 | 3p22.1 | CTTTGGAGGCAGAAGCTCTGGCCCCTATGGTGGTGGAGGCCAATACTTTGCCAAACCACAAAACCAAGGTGGCTATGGCGGTTC | 611 |
| 6718-R3-1 | | CAGTAG | |
| 6912-L3-1 | 13q22.3 | AGAATTAACTGCTGGACCCAGAGGCTGAAGGCACGTTGAAGGAATCCTTCATTTCTTGAGCCCTTGGTTTGAAAAGCTAGTGATTTT | 612 |
| 7019-R3-1 | 18q22.3 | TTCAAAGAAATTACTTAGCAATTAAACCTTCAGCAAAATTGTAATTCATTTTAAATTTAGCACGGAGGTTTGATGCTGTTTCTGAGGA | 613 |
| 7070-R3-1 | 14q12 | TCTCCTTCTTTCAAACATGTCAGTGACCAATTTCCTACAGTAAGTTTAGTGGGTCCTGGTGCTGACAGTATAGGTTGACTTGAAGTA | 614 |
| | | GA | |
| 7089-R1-1 | 6q16.2 | ATGCACTCTGCTGTCATTTGCAGCCTGACCTGCAGGTCAGGGGTGATGTGAGCTGGCTCAGGGATGCAT | 615 |
| 7158-R3-1 | 3q13.31 | ATTCAACACAGATTCAGGTGCTCTCAACAGCCATGAAAATATATGGCTGAAGAGGGAATCTATAAATGTAATGAAT | 616 |
| 7292-L3-4 | 1p34.1 | GCAATTAGAATGCAGGGAGGTTCAGAAGCTATTTAACTGGGTGACCCCTGAGGTCGCTGCATCTGACTCCCATCCCTGGATAAAT | 617 |
| | | ATTGT | |
| 7304-L3-1 | 1q24.2 | CAAATGTGGGAGCTTGGATCAATGTTGAAGAATAATTTTCATCATAGTGAAAATGTTGGTTCAAATAAATTTCTACACTTG | 618 |
| 7340-R3-1 | 6q16.1 | GCTCACATGGGAATCCAAAACCTTCTAATTTTCTATACAGATTCATTTCAGAATCAATTAGAGTTGGTGGCAGCCTTCTCCCTGTGT | 619 |
| | | GC | |
| 7375-L3-1 | 6q23.3 | CAGGTATGTAACTGTGGAGACAGCAGCGCTGCAGAAGAGGCCTCCTGATCAGAAAGAATGTCTGTCCCACAGTTGACTCTCTG | 620 |
| 7435-L3-2 | 6q16.1 | GTAGGAAACACAGCTAATGGGGCTTAGCAACAGATGGGGAGCCAGCACAAAGCTGTAGGTTCTTCCTCTGCCTCGGCTGTGACT | 621 |
| | | TCCTGC | |
| 7543-L3-2 | 1p36.22 | TCATCTCGGGGCCTGGTGAATTAGGACGACATCGGCATTTTTTATTGCTAAAGACGTCCAGATTGATCCAGCCCTTGGCTGA | 622 |
| 7597-L3-1 | 11p14.1 | GGGATTGATCTGAGGGACACAGAGCCCAGGTTCCATTAAAGTGTATTAATGCCAAGGTCTGTGCAATTAGTGAAAAGTCAATTCC | 623 |
| 7763-R3-1 | 8q11.21 | GGCTTGGGCTTTGTTGGTCTTCCACTGCTCTGCTACATCATTTGCTAATGGATCGTCTGGATTGGGAGCACATAACAAGGCCTGG | 624 |
| | | GTT | |
| 7824-R3-1 | 6q16.2 | CCTGGATGCTGTTTCATTATGTAGAGTCAGGCAAAAGACAGACGGATGTGTGTGTGAGGCGGCGATGAAGCTGGCACCAGG | 625 |
| 8075-L3-1 | 10q22.1 | CAGCTGGCCTGGTGCCCTGGTGCGTGGAGGTGTAGCTGGGCTCTGACCCAGCTCCTCAAACAGGTTCCATATGGCCCTCCCGG | 626 |
| | | CTG | |
| 8336-R3-1 | Xq13.1 | CCTCCCCAAGCAATCTGCTCACCCACTTGTTGTCATGGTGACTCTGGCTGGGGGTGTGGGGACTGAGTGGGGAGG | 627 |
| 8434-R3-1 | 9q34.11 | AGGAGGCCCTGAGTGCTAGTAGCCACTTATAGAAAGTCGCTTCCAGCAATTCTTCTAGGAGTGGAGCCTCAGGGCTGCCT | 628 |
| 8552-R3-1 | 13q21.33 | CTCCTAGTGGTATCTGTCATAAAGATACTGTTCAAGGCATATTTCATTATATTTTATAGTGTCCTCTTTATGGTGACCCTTGGGAG | 629 |
| 8685-L3-1 | 17p13.3 | GGGAGACATTCCACTTATAGGAGGCAAAGAGCAGGATATCTGCACAGGAAGAGTTCATCTTATATGACTTTCGGGGATGGATTGT | 630 |
| | | CTCCT | |
| 8719-L3-2 | 5q22.3 | AGAGCGCAGCTACTGGTGCTTTGCAGGAGGCAAGTGAGGCCTATCTGGTTGGCCTTTTTGAAGACACCAACCTGTGCGCT | 631 |
| 8760-L3-1 | 3q27.3 | GGTCATGCTATGCCTGGGGTGAGTTTTGCCTCGGGGCTCCAGGCGGCACTGGAGCAGAGCTGAGCTAATTTTACCCACAGGAGC | 632 |
| | | TGACT | |
| 9092-R3-2 | 18q22.3 | CTTCTTATAAGTCTGTGGTCACAGTATGTTTTTTGCAGTTCAGCATCTGGCTCTGTGGGATACTGATGGCTTCTAGGAAG | 633 |
| 9557-R3-1 | 22q12.1 | TGCCTGCTCTGGCCAGAACCAAAGCACGTGTCAGCTTTTTTATTTAGGGCAAGAGGTGCAGAATGGACTGGGCCAGTCCAGGCA | 634 |
| 9582-R3-2 | 5q31.1 | TTTTACACATTGTCAGCTGCATCTATTAATTTTCTTACTGTCAGAGACAGTTAAGGGAGCCTTTGTGGAAACATCTGAGGATTTGTA | 635 |
| | | AAA | |
| 9688-L2-1 | Xq26.2 | TGCAGCAGAACAGTCTGGGGCCATTTAGCTTAGGGGCAAATAGTTCCTCATACTTCAAAGAGCCCTAAGGACATTGCTGCA | 636 |
| 9694-R3-1 | 7q21.2 | TTATTATGCAACATCTGCTCTGAATTTCAAATGTGATAAACAGAGTATGAGTGTCGGTGGCAGATGGCTAATGA | 637 |
| 9747-L3-1 | 18q11.2 | GAGCTGCTTTGAATTGCTCGCAGTTTGCCGGAGGCGGTGTGCTGGGTTGGACGCTCCGGGAAACAAAGCAACCCAAAACAGCTC | 638 |
| 9772-L3-1 | 10p15.2 | TCAGGAAAGGTCATGGGAAAAATGCTGTAGAATTTTCTAATGGTTCATCCATCAAAAATGCAGCTCTCCATTGATTCTTCCCGA | 639 |
| 9798-R3-2 | 5q12.3 | GTGCTTTTCTTTCCCCCCAAAGAAGTCATACCAGGTATATATAGAGAGATCTATAATGCCCTTCTGTTGGGGGAATGAAAGCAC | 640 |
| 9812-L3-1 | 5p13.3 | AGCAAGCTGGGGAGCCCAGATAAATAGAGCTTTCTGTTTCCTTTCCTGGAGTCTAAAATATCTGATCTGGAGGTTCCCTCCCTGCT | 641 |
| 9813-R3-2 | 12p13.32 | GAAAGTGTCGGGCCTTTTGAAATTGTCAGAGAAACTGATTTTCTTGTCAAGTCTCATCCTGTACAGTTGGAGGGCCAAATTCTACT | 642 |
| | | TTC | |
| 9987-R2-2 | 13q13.3 | CAGGCATTGCCTGGCTCAGAGACCTTTGCTGCTGAGCAAACTGAGTTAACAAAGTGGGCTGAGGGGTGAAGCCTG | 643 |
| 10093-R2-2 | 2p11.2 | TGTTTCCAGCATTCCCAGGTAGGCCAAGGTGTCCTACAGAAAAACCTTGGGTTAGACCTACAGGGGGTCTGGCTGGTGTTAACA | 644 |
| 10120-R3-1 | 7p14.1 | CAAGTTTCCTGAGCCCTGGGTTGATATACTGTACCATCTTTGGTGCAGCTGTAATTTTAACAAGGGGAACCGACTTG | 645 |
| 10133-R3-1 | Xp11.4 | CTCTTCCCATATTTAATGTGGCTCTAATTCTGACTTCATTGCAGAGCGGTGAAATCAAATTAGGAAATGGGAGGAG | 646 |
| 10154-R1-1 | 6p12.2 | ATTCCAAGGGTCTGACACTTGTCTAAATCCTGTAGAAATGAGATCAAGGGCAAAGGGCACAGATCCTGGGAAT | 647 |
| 10198-R3-1 | 2p16.1 | GAGCAGTTCTTGTTGCCCATCACATTTTAGTGCAGGGAAGTGCTTTGCCCTAAAGGTGCCAGGTAAAGAGAATTGCC | 648 |
| 10260-L3-1 | 22q13.1 | GTGGGAGACATCGGGTGGGGGCCCTGGCGAACAATAGGTGGGCCCAGCTGGGGCCCCCTCCTGCCTGCCTCACCGC | 649 |
| 10346-R3-2 | 10q25.3 | TGGGCAGAGCCAGGTCTGCACCCTCGGGAGCCCTGGAGGCCAGGTGAGCTGCTGCAGAGGGCACAGACAGGCTCATACTCA | 650 |
| 10539-R3-1 | 2p22.3 | TAGATGGGAATTTGAGTGGCATTGTTTCTCAGGCCTGCTGGAGGCTGGGGGATAGTAAATTTTCTCAAATACCATTTA | 651 |
| 10543-R3-1 | 1p31.1 | GCCTTAACCTTTTTATCATTTATCTTCTTGTATTAATGTCACTGAATTATTAATTCATGAGCCAGGATGGGAAGGGTGAAGGC | 652 |
| 10553-R1-1 | 1q24.2 | GCTGGCTCCTGCTCAGAGTGACAGCACCCTGTGGAGTCTGCTGGTACTGACCTAACCACCACAGAGCCCCACTGGAGCATGGAG | 653 |
| | | CCAGC | |
| 10562-L1-2 | 8p12 | TGATCAGGCGCTTGATATGACAGGCTGTGGGAGTCAGGACCCCTTGAACAGAGTGGGCCTTGTCTGTCACAGTCCGCCTGACA | 654 |
| 10594-L3-1 | 3p14.2 | CTGTTGAGTGGGTGTTGGTGTGGGTAACAATAATGTTGTTTTCATAATATGTGCTGGCAGATTAGCACACTTCTCTACAG | 655 |
| 10639-R2-1 | 2q31.2 | TGACGACTGGCCCCGCCTCTTCCTCTCGGTCCCATATTGAACTCGAGTTGGAAGAGGCGAGTCCGGTCTCA | 656 |
| let-7a | 09q22.32 | TGGGATGAGGTAGTAGGTTGTATAGTTTTAGGGTCACACCCACCACTGGGAGATAACTATACAATCTACTGTCTTTCCTA | 657 |
| let-7a | 11q24.1 | AGGTTGAGGTAGTAGGTTGTATAGTTTAGAATTACATCAAGGGAGATAACTGTACAGCCTCCTAGCTTTCCT | 658 |
| let-7a | 22q13.31 | GGGTGAGGTAGTAGGTTGTATAGTTTGGGGCTCTGCCCTGCTATGGGATAACTATACAATCTACTGTCTTTCCT | 659 |
| let-7b | 22q13.31 | CGGGGTGAGGTAGTAGGTTGTGTGGTTTCAGGGCAGTGATGTTGCCCCTCGGAAGATAACTATACAACCTACTGCCTTCCCTG | 660 |
| let-7c | 21q21.1 | GCATCCGGGTTGAGGTAGTAGGTTGTATGGTTTAGAGTTACACCCTGGGAGTTAACTGTACAACCTTCTAGCTTTCCTTGGAGC | 661 |
| let-7d | 09q22.32 | CCTAGGAAGAGGTAGTAGGTTGCATAGTTTTAGGGCAGGGATTTTGCCCACAAGGAGGTAACTATACGACCTGCTGCCTTTCTTA | 662 |
| | | GG | |
| let-7e | 19q13.41 | CCCGGGCTGAGGTAGGAGGTTGTATAGTTGAGGAGGACACCCAAGGAGATCACTATACGGCCTCCTAGCTTTCCCCAGG | 663 |
| let-7f | 09q22.32 | TCAGAGTGAGGTAGTAGATTGTATAGTTGTGGGGTAGTGATTTTACCCTGTTCAGGAGATAACTATACAATCTATTGCCTTCCCTGA | 664 |
| let-7f | xp11.22 | TGTGGGATGAGGTAGTAGATTGTATAGTTTTAGGGTCATACCCCATCTTGGAGATAACTATACAGTCTACTGTCTTTCCCACG | 665 |
| let-7g | 03p21.2 | AGGCTGAGGTAGTAGTTTGTACAGTTTGAGGGTCTATGATACCACCCGGTACAGGAGATAACTGTACAGGCCACTGCCTTGCCA | 666 |
| let-7i | 12q14.1 | CTGGCTGAGGTAGTAGTTTGTGCTGTTGGTCGGGTTGTGACATTGCCCGCTGTGGAGATAACTGCGCAAGCTACTGCCTTGCTA | 667 |
| miR-100 | 11q24.1 | CCTGTTGCCACAAACCCGTAGATCCGAACTTGTGGTATTAGTCCGCACAAGCTTGTATCTATAGGTATGTGTCTGTTAGG | 668 |
| miR-1224-5p | 03q27.1 | GTGAGGACTCGGGAGGTGGAGGGTGGTGCCGCCGGGGCCGGGCGCTGTTTCAGCTCGCTTCTCCCCCCACCTCCTCTCTCCTC | 669 |
| | | AG | |
| miR-1225-5p | 16p13.3 | GTGGGTACGGCCCAGTGGGGGGGAGAGGGACACGCCCTGGGCTCTGCCCAGGGTGCAGCCGGACTGACTGAGCCCCTGTGCC | 670 |
| | | GCCCCCAG | |
| miR-1228* | 12q13.3 | GTGGGCGGGGGCAGGTGTGTGGTGGGTGGTGGCCTGCGGTGAGCAGGGCCCTCACACCTGCCTCGCCCCCCAG | 671 |
| miR-125a-5p | 19q13.41 | TGCCAGTCTCTAGGTCCCTGAGACCCTTTAACCTGTGAGGACATCCAGGGTCACAGGTGAGGTTCTTGGGAGCCTGGCGTCTGG | 672 |
| | | CC | |
| miR-125b | 11q24.1 | TGCGCTCCTCTCAGTCCCTGAGACCCTAACTTGTGATGTTTACCGTTTAAATCCACGGGTTAGGCTCTTGGGAGCTGCGAGTCGT | 673 |
| | | GCT | |
| miR-125b | 21q21.1 | ACCAGACTTTTCCTAGTCCCTGAGACCCTAACTTGTGAGGTATTTTAGTAACATCACAAGTCAGGCTCTTGGGACCTAGGCGGAG | 674 |
| | | GGGA | |
| miR-126 | 09q34.3 | CGCTGGCGACGGGACATTATTACTTTTGGTACGCGCTGTGACACTTCAAACTCGTACCGTGAGTAATAATGCGCCGTCCACGGCA | 675 |
| miR-126* | | | |
| miR-135 | 03p21.1 | AGGCCTCGCTGTTCTCTATGGCTTTTTATTCCTATGTGATTCTACTGCTCACTCATATAGGGATTGGAGCCGTGGCGCACGGCGG | 676 |
| miR-135a* | | GGACA | |
| miR-142-3p | 17q23.2 | GACAGTGCAGTCACCCATAAAGTAGAAAGCACTACTAACAGCACTGGAGGGTGTAGTGTTTCCTACTTTATGGATGAGTGTACTGTG | 677 |
| miR-145 | 05q32.1 | CACCTTGTCCTCACGGTCCAGTTTTCCCAGGAATCCCTTAGATGCTAAGATGGGGATTCCTGGAAATACTGTTCTTGAGGTCATGG | 678 |
| | | TT | |
| miR-146b-5p | 10q24.32 | CCTGGCACTGAGAACTGAATTCCATAGGCTGTGAGCTCTAGCAATGCCCTGTGGACTCAGTTCTGGTGCCCGG | 679 |
| miR-149 | 02q37.3 | GCCGGCGCCCGAGCTCTGGCTCCGTGTCTTCACTCCCGTGCTTGTCCGAGGAGGGAGGGAGGGACGGGGGCTGTGCTGGGGC | 680 |
| miR-149* | | AGCTGGA | |
| miR-150 | 19q13.33 | CTCCCCATGGCCCTGTCTCCCAACCCTTGTACCAGTGCTGGGCTCAGACCCTGGTACAGGCCTGGGGGACAGGGACCTGGGGAC | 681 |
| miR-150* | | | |
| miR-155 | 21q21.3 | CTGTTAATGCTAATCGTGATAGGGGTTTTTGCCTCCAACTGACTCCTACATATTAGCATTAACAG | 682 |
| miR-16 | 13q14.2 | GTCAGCAGTGCCTTAGCAGCACGTAAATATTGGCGTTAAGATTCTAAAATTATCTCCAGTATTAACTGTGCTGCTGAAGTAAGGTT | 683 |
| | | GAC | |
| miR-16 | 03q25.33 | GTTCCACTCTAGCAGCACGTAAATATTGGCGTAGTGAAATATATATTAAACACCAATATTACTGTGCTGCTTTAGTGTGAC | 684 |
| miR-181c | 19p13.12 | CGGAAAATTTGCCAAGGGTTTGGGGGAACATTCAACCTGTCGGTGAGTTTGGGCAGCTCAGGCAAACCATCGACCGTTGAGTGG | 685 |
| | | ACCCTGAGGCCTGGAATTGCCATCCT | |
| miR-198 | 03q13.33 | TCATTGGTCCAGAGGGGAGATAGGTTCCTGTGATTTTTCCTTCTTCTCTATAGAATAAATGA | 686 |
| miR-199a-3p | 19p13.2 | GCCAACCCAGTGTTCAGACTACCTGTTCAGGAGGCTCTCAATGTGTACAGTAGTCTGCACATTGGTTAGGC | 687 |
| miR-199a-3p | 01q24.3 | AGGAAGCTTCTGGAGATCCTGCTCCGTCGCCCCAGTGTTCAGACTACCTGTTCAGGACAATGCCGTTGTACAGTAGTCTGCACAT | 688 |
| | | TGGTTAGACTGGGCAAGGGAGAGCA | |
| miR-199b-3p | 09q34.11 | CCAGAGGACACCTCCACTCCGTCTACCCAGTGTTTAGACTATCTGTTCAGGACTCCCAAATTGTACAGTAGTCTGCACATTGGTTA | 689 |
| | | GGCTGGGCTGGGTTAGACCCTCGG | |
| miR-19b | 13q31.3 | CACTGTTCTATGGTTAGTTTTGCAGGTTTGCATCCAGCTGTGTGATATTCTGCTGTGCAAATCCATGCAAAACTGACTGTGGTAGTG | 690 |
| miR-19b | Xq26.2 | ACATTGCTACTTACAATTAGTTTTGCAGGTTTGCATTTCAGCGTATATATGTATATGTGGCTGTGCAAATCCATGCAAAACTGATTG | 691 |
| | | TGATAATGT | |
| miR-200b | 01p36.33 | CCAGCTCGGGCAGCCGTGGCCATCTTACTGGGCAGCATTGGATGGAGTCAGGTCTCTAATACTGCCTGGTAATGATGACGGCGG | 692 |
| | | AGCCCTGCACG | |
| miR-200c | 12p13.31 | CCCTCGTCTTACCCAGCAGTGTTTGGGTGCGGTTGGGAGTCTCTAATACTGCCGGGTAATGATGGAGG | 693 |
| miR-205 | 01q32.2 | AAAGATCCTCAGACAATCCATGTGCTTCTCTTGTCCTTCATTCCACCGGAGTCTGTCTCATACCCAACCAGATTTCAGTGGAGTGA | 694 |
| | | AGTTCAGGAGGCATGGAGCTGACA | |
| miR-21 | 17q23.2 | TGTCGGGTAGCTTATCAGACTGATGTTGACTGTTGAATCTCATGGCAACACCAGTCGATGGGCTGTCTGACA | 695 |
| miR-23a | 19p13.12 | GGCCGGCTGGGGTTCCTGGGGATGGGATTTGCTTCCTGTCACAAATCACATTGCCAGGGATTTCCAACCGACC | 696 |
| miR-23a* | | | |
| miR-23b | 09q22.32 | CTCAGGTGCTCTGGCTGCTTGGGTTCCTGGCATGCTGATTTGTGACTTAAGATTAAAATCACATTGCCAGGGATTACCACGCAAC | 697 |
| | | CACGACCTTGGC | |
| miR-24-1 | 09q22.32 | CTCCGGTGCCTACTGAGCTGATATCAGTTCTCATTTTACACACTGGCTCAGTTCAGCAGGAACAGGAG | 698 |
| miR-24-2 | 19p13.12 | CTCTGCCTCCCGTGCCTACTGAGCTGAAACACAGTTGGTTTGTGTACACTGGCTCAGTTCAGCAGGAACAGGG | 699 |
| miR-25* | 07q22.1 | GGCCAGTGTTGAGAGGCGGAGACTTGGGCAATTGCTGGACGCTGCCCTGGGCATTGCACTTGTCTCGGTCTGACAGTGCCGGCC | 700 |
| miR-26a-1 | 03p22.3 | GTGGCCTCGTTCAAGTAATCCAGGATAGGCTGTGCAGGTCCCAATGGGCCTATTCTTGGTTACTTGCACGGGGACGC | 701 |
| miR-26a-2 | 12q14.1 | GGCTGTGGCTGGATTCAAGTAATCCAGGATAGGCTGTTTCCATCTGTGAGGCCTATTCTTGATTACTTGTTTCTGGAGGCAGCT | 702 |
| miR-26b | 02q35 | CCGGGACCCAGTTCAAGTAATTCAGGATAGGTTGTGTGCTGTCCAGCCTGTTCTCCATTACTTGGCTCGGGGACCGG | 703 |
| miR-27a | 19p13.12 | CTGAGGAGCAGGGCTTAGCTGCTTGTGAGCAGGGTCCACACCAAGTCGTGTTCACAGTGGCTAAGTTCCGCCCCCCAG | 704 |
| miR-27b | 09q22.32 | ACCTCTCTAACAAGGTGCAGAGCTTAGCTGATTGGTGAACAGTGATTGGTTTCCGCTTTGTTCACAGTGGCTAAGTTCTGCACCTG | 705 |
| | | AAGAGAAGGTG | |
| miR-298 | 20q13.32 | TCAGGTCTTCAGCAGAAGCAGGGAGGTTCTCCCAGTGGTTTTCCTTGACTGTGAGGAACTAGCCTGCTGCTTTGCTCAGGAGTGA | 706 |
| | | GCT | |
| miR-29a | 07q32.3 | ATGACTGATTTCTTTTGGTGTTCAGAGTCAATATAATTTTCTAGCACCATCTGAAATCGGTTAT | 707 |
| miR-29b-2 | 07q32.3 | CTTCAGGAAGCTGGTTTCATATGGTGGTTTAGATTTAAATAGTGATTGTCTAGCACCATTTGAAATCAGTGTTCTTGGGGG | 708 |
| miR-29b-1 | 01q32.2 | CTTCTGGAAGCTGGTTTCACATGGTGGCTTAGATTTTTCCATCTTTGTATCTAGCACCATTTGAAATCAGTGTTTTAGGAG | 709 |
| miR-29c* | 01q32.2 | ATCTCTTACACAGGCTGACCGATTTCTCCTGGTGTTCAGAGTCTGTTTTTGTCTAGCACCATTTGAAATCGGTTATGATGTAGGGG | 710 |
| | | GA | |
| miR-30a | 06q13 | GCGACTGTAAACATCCTCGACTGGAAGCTGTGAAGCCACAGATGGGCTTTCAGTCGGATGTTTGCAGCTGC | 711 |
| miR-30a-3p | | | |
| miR-30b | 08q24.22 | ACCAAGTTTCAGTTCATGTAAACATCCTACACTCAGCTGTAATACATGGATTGGCTGGGAGGTGGATGTTTACTTCAGCTGACTTG | 712 |
| miR-30c* | | GA | |
| miR-30c | 01p34.2 | ACCATGCTGTAGTGTGTGTAAACATCCTACACTCTCAGCTGTGAGCTCAAGGTGGCTGGGAGAGGGTTGTTTACTCCTTCTGCCA | 713 |
| miR-30c-1* | 06q13 | TGGA | |
| miR-30c-2 | 06q13 | AGATACTGTAAACATCCTACACTCTCAGCTGTGGAAAGTAAGAAAGCTGGGAGAAGGCTGTTTACTCTTTCT | 714 |
| miR-30d | 08q24.22 | GTTGTTGTAAACATCCCCGACTGGAAGCTGTAAGACACAGCTAAGCTTTCAGTCAGATGTTTGCTGCTAC | 715 |
| miR-30e | 01p34.2 | GGGCAGTCTTTGCTACTGTAAACATCCTTGACTGGAAGCTGTAAGGTGTTCAGAGGAGCTTTCAGTCGGATGTTTACAGCGGCAG | 716 |
| | | GCTGCCA | |
| miR-320a | 08p21.3 | GCTTCGCTCCCCTCCGCCTTCTCTTCCCGGTTCTTCCCGGAGTCGGGAAAAGCTGGGTTGAGAGGGCGAAAAAGGATGAGGT | 717 |
| miR-320 | | | |
| miR-331-3p | 12q22 | GAGTTTGGTTTTGTTTGGGTTTGTTCTAGGTATGGTCCCAGGGATCCCAGATCAAACCAGGCCCCTGGGCCTATCCTAGAACCAA | 718 |
| miR-331 | | CCTAAGCTC | |
| miR-371-5p | 19q13.42 | GTGGCACTCAAACTGTGGGGGCACTTTCTGCTCTCTGGTGAAAGTGCCGCCATCTTTTGAGTGTTAC | 719 |
| miR-371 | | | |
| miR-373* | 19q13.42 | GGGATACTCAAAATGGGGGCGCTTTCCTTTTTGTCTGTACTGGGAAGTGCTTCGATTTTGGGGTGTCCC | 720 |
| miR-375 | 02q35 | CCCCGCGACGAGCCCCTCGCACAAACCGGACCTGAGCGTTTTGTTCGTTCGGCTCGCGTGAGGC | 721 |
| miR-423-5p | 17q11.2 | ATAAAGGAAGTTAGGCTGAGGGGCAGAGAGCGAGACTTTTCTATTTTCCAAAAGCTCGGTCTGAGGCCCCTCAGTCTTGCTTCCT | 722 |
| | | AACCCGCGC | |
| miR-424 | Xq26.3 | CGAGGGGATACAGCAGCAATTCATGTTTTGAAGTGTTCTAAATGGTTCAAAACGTGAGGCGCTGCTATACCCCCTCGTGGGGAAG | 723 |
| | | GTAGAAGGTGGGG | |
| miR-483-5p | 11p15.5 | GAGGGGGAAGACGGGAGGAAAGAAGGGAGTGGTTCCATCACGCCTCCTCACTCCTCTCCTCCCGTCTTCTCCTCTC | 724 |
| miR-486-3p | 08p11.21 | GCATCCTGTACTGAGCTGCCCCGAGGCCCTTCATGCTGCCCAGCTCGGGGCAGCTCAGTACAGGATAC | 725 |
| miR-491-3p | 09p21.3 | TTGACTTAGCTGGGTAGTGGGGAACCCTTCCATGAGGAGTAGAACACTCCTTATGCAAGATTCCCTTCTACCTGGCTGGGTTGG | 726 |
| miR-491-5p | | | |
| miR-513a-5p | Xq27.3 | GGGATGCCACATTCAGCCATTCAGCGTACAGTGCCTTTCACAGGGAGGTGTCATTTATGTGAACTAAAATATAAATTTCACCTTTC | 727 |
| | | TGAGAAGGGTAATGTACAGCATGCACTGCATATGTGGTGTCCC | |
| miR-513a-5p | Xq27.3 | GGATGCCACATTCAGCCATTCAGTGTGCAGTGCCTTTCACAGGGAGGTGTCATTTATGTGAACTAAAATATAAATTTCACCTTTCT | 728 |
| | | GAGAAGGGTAATGTACAGCATGCACTGCATATGTGGTGTCC | |
| miR-513b | Xq27.3 | GTGTACAGTGCCTTTCACAAGGAGGTGTCATTTATGTGAACTAAAATATAAATGTCACCTTTTTGAGAGGAGTAATGTACAGCA | 729 |
| miR-516a-5p | 19q13.42 | TCTCAGGCTGTGACCTTCTCGAGGAAAGAAGCACTTTCTGTTGTCTGAAAGAAAAGAAAGTGCTTCCTTTCAGAGGGTTACGGTTT | 730 |
| | | GAGA | |
| miR-550 | 07p15.1 | TGATGCTTTGCTGGCTGGTGCAGTGCCTGAGGGAGTAAGAGCCCTGTTGTTGTAAGATAGTGTCTTACTCCCTCAGGCACATCTC | 731 |
| | | CAACAAGTCTCT | |
| miR-550 | 07p14.3 | TGATGCTTTGCTGGCTGGTGCAGTGCCTGAGGGAGTAAGAGCCCTGTTGTTGTCAGATAGTGTCTTACTCCCTCAGGCACATCTC | 732 |
| | | CAGCGAGTCTCT | |
| miR-557 | 01q24.2 | AGAATGGGCAAATGAACAGTAAATTTGGAGGCCTGGGGCCCTCCCTGCTGCTGGAGAAGTGTTTGCACGGGTGGGCCTTGTCTT | 733 |
| | | TGAAAGGAGGTGGA | |
| miR-575 | 04q21.22 | AATTCAGCCCTGCCACTGGCTTATGTCATGACCTTGGGCTACTCAGGCTGTCTGCACAATGAGCCAGTTGGACAGGAGCAGTGC | 734 |
| | | CACTCAACTC | |
| miR-612 | 11q13.1 | TCCCATCTGGACCCTGCTGGGCAGGGCTTCTGAGCTCCTTAGCACTAGCAGGAGGGGCTCCAGGGGCCCTCCCTCCATGGCAG | 735 |
| | | CCAGGACAGGACTCTCA | |
| miR-614 | 12p13.1 | TCTAAGAAACGCAGTGGTCTCTGAAGCCTGCAGGGGCAGGCCAGCCCTGCACTGAACGCCTGTTCTTGCCAGGTGGCAGAAGGT | 736 |
| | | TGCTGC | |
| miR-630 | 15q24.1 | AACTTAACATCATGCTACCTCTTTGTATCATATTTTGTTATTCTGGTCACAGAATGACCTAGTATTCTGTACCAGGGAAGGTAGTTC | 737 |
| | | TTAACTATAT | |
| miR-637 | 19p13.3 | TGGCTAAGGTGTTGGCTCGGGCTCCCCACTGCAGTTACCCTCCCCTCGGCGTTACTGAGCACTGGGGGCTTTCGGGCTCTGCGT | 738 |
| | | CTGCACAGATACTTC | |
| miR-638 | 19p13.2 | GTGAGCGGGCGCGGCAGGGATCGCGGGCGGGTGGCGGCCTAGGGCGCGGAGGGCGGACCGGGAATGGCGCGCCGTGCGCC | 739 |
| | | GCCGGCGTAACTGCGGCGCT | |
| miR-658 | 22q13.1 | GCTCGGTTGCCGTGGTTGCGGGCCCTGCCCGCCCGCCAGCTCGCTGACAGCACGACTCAGGGCGGAGGGAAGTAGGTCCGTT | 740 |
| | | GGTCGGTCGGGAACGAGG | |
| miR-663 | 20p11.1 | CCTTCCGGCGTCCCAGGCGGGGCGCCGCGGGACCGCCCTCGTGTCTGTGGCGGTGGGATCCCGCGGCCGTGTTTTCCTGGTG | 741 |
| | | GCCCGGCCATG | |
| miR-671-5p | 07q36.1 | GCAGGTGAACTGGCAGGCCAGGAAGAGGAGGAAGCCCTGGAGGGGCTGGAGGTGATGGATGTTTTCCTCCGGTTCTCAGGGCT | 742 |
| | | CCACCTCTTTCGGGCCGTAGAGCCAGGGCTGGTGC | |
| miR-675 | 11p15.5 | CCCAGGGTCTGGTGCGGAGAGGGCCCACAGTGGACTTGGTGACGCTGTATGCCCTCACCGCTCAGCCCCTGGG | 743 |
| miR-708 | 11q14.1 | AACTGCCCTCAAGGAGCTTACAATCTAGCTGGGGGTAAATGACTTGCACATGAACACAACTAGACTGTGAGCTTCTAGAGGGCAG | 744 |
| | | GGA | |
| miR-744 | 17p12 | TTGGGCAAGGTGCGGGGCTAGGGCTAACAGCAGTCTTACTGAAGGTTTCCTGGAAACCACGCACATGCTGTTGCCACTAACCTC | 745 |
| | | AACCTTACTCGGTC | |
| miR-765 | 01q23.1 | TTTAGGCGCTGATGAAAGTGGAGTTCAGTAGACAGCCCTTTTCAAGCCCTACGAGAAACTGGGGTTTTGGAGGAGAAGGAAGG | 746 |
| | | TGATGAAGGATCTGTTCTCGTGAGCCTGAA | |
| miR-920 | 12p12.1 | GTAGTTGTTCTACAGAAGACCTGGATGTGTAGGAGCTAAGACACACTCCAGGGGAGCTGTGGAAGCAGTAACACG | 747 |
| miR-923 | 17q12 | TATTTGTCAGCGGAGGAAAAGAAACTAACCAGGATTCCCTCAGTAATGGCGAGTG | 748 |
| miR-92a-2* | Xq26.2 | TCATCCCTGGGTGGGGATTTGTTGCATTACTTGTGTTCTATATAAAGTATTGCACTTGTCCCGGCCTGTGGAAGA | 749 |
| miR-92b* | 01q22 | CGGGCCCCGGGCGGGCGGGAGGGACGGGACGCGGTGCAGTGTTGTTTTTTCCCCCGCCAATATTGCACTCGTCCCGGCCTCC | 750 |
| | | GGCCCCCCCGGCCC | |
| miR-93 | 07q22.1 | CTGGGGGCTCCAAAGTGCTGTTCGTGCAGGTAGTGTGATTACCCAACCTACTGCTGAGCTAGCACTTCCCGAGCCCCCGG | 751 |
| miR-98 | xp11.22 | AGGATTCTGCTCATGCCAGGGTGAGGTAGTAAGTTGTATTGTTGTGGGGTAGGGATATTAGGCCCCAATTAGAAGATAACTATAC | 752 |
| | | AACTTACTACTTTCCCTGGTGTGTGGCATATTCA | |
| miR-99b | 19q13.41 | GGCACCCACCCGTAGAACCGACCTTGCGGGGCCTTCGCCGCACACAAGCTCGTGTCTGTGGGTCCGTGTC | 753 |
| miR-103 | 5q34 | TACTGCCCTCGGCTTCTTTACAGTGCTGCCTTGTTGCATATGGATCAAGCAGCATTGTACAGGGCTATGAAGGCATTG | 754 |
| miR-103 | 20p13 | TTGTGCTTTCAGCTTCTTTACAGTGCTGCCTTGTAGCATTCAGGTCAAGCAGCATTGTACAGGGCTATGAAAGAACCA | 755 |
| miR-106a | Xq26.2 | CCTTGGCCATGTAAAAGTGCTTACAGTGCAGGTAGCTTTTTGAGATCTACTGCAATGTAAGCACTTCTTACATTACCATGG | 756 |
| miR-106b | 7q22.1 | CCTGCCGGGGCTAAAGTGCTGACAGTGCAGATAGTGGTCCTCTCCGTGCTACCGCACTGTGGGTACTTGCTGCTCCAGCAGG | 757 |
| miR-107 | 10q23.31 | CTCTCTGCTTTCAGCTTCTTTACAGTGTTGCCTTGTGGCATGGAGTTCAAGCAGCATTGTACAGGGCTATCAAAGCACAGA | 758 |
| miR-130a | 11q12.1 | TGCTGCTGGCCAGAGCTCTTTTCACATTGTGCTACTGTCTGCACCTGTCACTAGCAGTGCAATGTTAAAAGGGCATTGGCCGTGT | 759 |
| | | AGTG | |
| miR-130b | 22q11.21 | GGCCTGCCCGACACTCTTTCCCTGTTGCACTACTATAGGCCGCTGGGAAGCAGTGCAATGATGAAAGGGCATCGGTCAGGTC | 760 |
| miR-134 | 14q32.31 | CAGGGTGTGTGACTGGTTGACCAGAGGGGCATGCACTGTGTTCACCCTGTGGGCCACCTAGTCACCAACCCTC | 761 |
| miR-138 | 3p21.33 | CGTTGCTGCAGCTGGTGTTGTGAATCAGGCCGACGAGCAGCGCATCCTCTTACCCGGCTATTTCACGACACCAGGGTTGCATCA | 762 |
| miR-138 | 16q13 | CCCTGGCATGGTGTGGTGGGGCAGCTGGTGTTGTGAATCAGGCCGTTGCCAATCAGAGAACGGCTACTTCACAACACCAGGGCC | 763 |
| | | ACACCACACTACAGG | |
| miR-15a | 13q14.2 | CCTTGGAGTAAAGTAGCAGCACATAATGGTTTGTGGATTTTGAAAAGGTGCAGGCCATATTGTGCTGCCTCAAAAATACAAGG | 764 |
| miR-15b | 03q25.33 | TTGAGGCCTTAAAGTACTGTAGCAGCACATCATGGTTTACATGCTACAGTCAAGATGCGAATCATTATTTGCTGCTCTAGAAATTTA | 765 |
| | | AGGAAATTCAT | |
| miR-17 | 13q31.3 | GTCAGAATAATGTCAAAGTGCTTACAGTGCAGGTAGTGATATGTGCATCTACTGCAGTGAAGGCACTTGTAGCATTATGGTGAC | 766 |
| miR-181a-1 | 9q33.3 | AGAAGGGCTATCAGGCCAGCCTTCAGAGGACTCCAAGGAACATTCAACGCTGTCGGTGAGTTTGGGATTTGAAAAAACCACTGAC | 767 |
| | | CGTTGACTGTACCTTGGGGTCCTTA | |
| miR-181a-2 | 9q33.3 | TGAGTTTTGAGGTTGCTTCAGTGAACATTCAACGCTGTCGGTGAGTTTGGAATTAAAATCAAAACCATCGACCGTTGATTGTACCC | 768 |
| | | TATGGCTAACCATCATCTACTCCA | |
| miR-181b-1 | 1q31.3 | CTGATGGCTGCACTCAACATTCATTGCTGTCGGTGGGTTTGAGTCTGAATCAACTCACTGATCAATGAATGCAAACTGCGGACCAA | 769 |
| | | ACA | |
| miR-181b-2 | 9q33.3 | CCTGTGCAGAGATTATTTTTTAAAAGGTCACAATCAACATTCATTGCTGTCGGTGGGTTGAACTGTGTGGACAAGCTCACTGAACA | 770 |
| | | ATGAATGCAACTGTGGCCCCGCTT | |
| miR-191 | 03p21.31 | CGGCTGGACAGCGGGCAACGGAATCCCAAAAGCAGCTGTTGTCTCCAGAGCATTCCAGCTGCGCTTGGATTTCGTCCCCTGCTC | 771 |
| | | TCCTGCCT | |
| miR-195 | 17p13.1 | AGCTTCCCTGGCTCTAGCAGCACAGAAATATTGGCACAGGGAAGCGAGTCTGCCAATATTGGCTGTGCTGCTCCAGGCAGGGTG | 772 |
| | | GTG | |
| miR-196b | 07p15.2 | ACTGGTCGGTGATTTAGGTAGTTTCCTGTTGTTGGGATCCACCTTTCTCTCGACAGCACGACACTGCCTTCATTACTTCAGTTG | 773 |
| miR-19a | 13q31.3 | GCAGTCCTCTGTTAGTTTTGCATAGTTGCACTACAAGAAGAATGTAGTTGTGCAAATCTATGCAAAACTGATGGTGGCCTGC | 774 |
| miR-20a | 13q31.3 | GTAGCACTAAAGTGCTTATAGTGCAGGTAGTGTTTAGTTATCTACTGCATTATGAGCACTTAAAGTACTGC | 775 |
| miR-20b | Xq26.2 | AGTACCAAAGTGCTCATAGTGCAGGTAGTTTTGGCATGACTCTACTGTAGTATGGGCACTTCCAGTACT | 776 |
| miR-22 | 17p13.3 | GGCTGAGCCGCAGTAGTTCTTCAGTGGCAAGCTTTATGTCCTGACCCAGCTAAAGCTGCCAGTTGAAGAACTGTTGCCCTCTGCC | 777 |
| miR-221 | Xp11.3 | TGAACATCCAGGTCTGGGGCATGAACCTGGCATACAATGTAGATTTCTGTGTTCGTTAGGCAACAGCTACATTGTCTGCTGGGTTT | 778 |
| | | CAGGCTACCTGGAAACATGTTCTC | |
| miR-222 | Xp11.3 | GCTGCTGGAAGGTGTAGGTACCCTCAATGGCTCAGTAGCCAGTGTAGATCCTGTCTTTCGTAATCAGCAGCTACATCTGGCTACT | 779 |
| | | GGGTCTCTGATGGCATCTTCTAGCT | |
| miR-25 | 07q22.1 | GGCCAGTGTTGAGAGGCGGAGACTTGGGCAATTGCTGGACGCTGCCCTGGGCATTGCACTTGTCTCGGTCTGACAGTGCCGGCC | 780 |
| miR-29c | 01q32.2 | ATCTCTTACACAGGCTGACCGATTTCTCCTGGTGTTCAGAGTCTGTTTTTGTCTAGCACCATTTGAAATCGGTTATGATGTAGGGG | 781 |
| | | GA | |
| miR-31 | 09p21.3 | GGAGAGGAGGCAAGATGCTGGCATAGCTGTTGAACTGGGAACCTGCTATGCCAACATATTGCCATCTTTCC | 782 |
| miR-335 | 07q32.2 | TGTTTTGAGCGGGGGTCAAGAGCAATAACGAAAAATGTTTGTCATAAACCGTTTTTCATTATTGCTCCTGACCTCCTCTCATTTGCT | 783 |
| | | ATATTCA | |
| miR-342-3p | 14q32.2 | GAAACTGGGCTCAAGGTGAGGGGTGCTATCTGTGATTGAGGGACATGGTTAATGGAATTGTCTCACACAGAAATCGCACCCGTCA | 784 |
| | | CCTTGGCCTACTTA | |
| miR-370 | 14q32.31 | AGACAGAGAAGCCAGGTCACGTCTCTGCAGTTACACAGCTCACGAGTGCCTGCTGGGGTGGAACCTGGTCTGTCT | 785 |
| miR-452 | Xq28 | GCTAAGCACTTACAACTGTTTGCAGAGGAAACTGAGACTTTGTAACTATGTCTCAGTCTCATCTGCAAAGAAGTAAGTGCTTTGC | 786 |
| miR-494 | 14q32.31 | GATACTCGAAGGAGAGGTTGTCCGTGTTGTCTTCTCTTTATTTATGATGAAACATACACGGGAAACCTCTTTTTTAGTATC | 787 |
| miR-7-1 | 9q21.32 | TTGGATGTTGGCCTAGTTCTGTGTGGAAGACTAGTGATTTTGTTGTTTTTAGATAACTAAATCGACAACAAATCACAGTCTGCCATA | 788 |
| | | TGGCACAGGCCATGCCTCTACAG | |
| miR-7-3 | 19p13.3 | AGATTAGAGTGGCTGTGGTCTAGTGCTGTGTGGAAGACTAGTGATTTTGTTGTTCTGATGTACTACGACAACAAGTCACAGCCGG | 789 |
| | | CCTCATAGCGCAGACTCCCTTCGAC | |
| miR-7-2 | 15q26.1 | CTGGATACAGAGTGGACCGGCTGGCCCCATCTGGAAGACTAGTGATTTTGTTGTTGTCTTACTGCGCTCAACAACAAATCCCAGT | 790 |
| | | CTACCTAATGGTGCCAGCCATCGCA | |
| miR-92-a1 | 13q31.3 | CTTTCTACACAGGTTGGGATCGGTTGCAATGCTGTGTTTCTGTATGGTATTGCACTTGTCCCGGCCTGTTGAGTTTGG | 791 |
| miR-92-a2 | Xq26.2 | TCATCCCTGGGTGGGGATTTGTTGCATTACTTGTGTTCTATATAAAGTATTGCACTTGTCCCGGCCTGTGGAAGA | 792 |
| miR-99a | 21q21.1 | CCCATTGGCATAAACCCGTAGATCCGATCTTGTGGTGAAGTGGACCGCACAAGCTCGCTTCTATGGGTCTGTGTCAGTGTG | 793 |

TABLE 4
Mature microRNA Sequences (5′ to 3′)

| microRNA | sequence | SEQ ID NO |
|---|---|---|
| let-7a | UGAGGUAGUAGGUUGUAUAGUU | 794 |
| let-7b | UGAGGUAGUAGGUUGUGUGGUU | 795 |
| let-7c | UGAGGUAGUAGGUUGUAUGGUU | 796 |
| let-7d | AGAGGUAGUAGGUUGCAUAGUU | 797 |
| let-7e | UGAGGUAGGAGGUUGUAUAGUU | 798 |
| let-7f | UGAGGUAGUAGAUUGUAUAGUU | 799 |
| let-7g | UGAGGUAGUAGUUUGUACAGUU | 800 |
| let-7i | UGAGGUAGUAGUUUGUGCUGUU | 801 |
| miR-100 | AACCCGUAGAUCCGAACUUGUG | 802 |
| miR-103 | AGCAGCAUUGUACAGGGCUAUGA | 803 |
| miR-106a | AAAAGUGCUUACAGUGCAGGUAG | 804 |
| miR-106b | UAAAGUGCUGACAGUGCAGAU | 805 |
| miR-107 | AGCAGCAUUGUACAGGGCUAUCA | 806 |
| miR-1224-5p | GUGAGGACUCGGGAGGUGG | 807 |
| miR-1225-5p | GUGGGUACGGCCCAGUGGGGGG | 808 |
| miR-1228* | GUGGGCGGGGGCAGGUGUGUG | 809 |
| miR-125a-5p | UCCCUGAGACCCUUUAACCUGUGA | 810 |
| miR-125b | UCCCUGAGACCCUAACUUGUGA | 811 |
| miR-126 | UCGUACCGUGAGUAAUAAUGCG | 812 |
| miR-130a | CAGUGCAAUGUUAAAAGGGCAU | 813 |
| miR-130b | CAGUGCAAUGAUGAAAGGGCAU | 814 |
| miR-134 | UGUGACUGGUUGACCAGAGGGG | 815 |
| miR-138 | AGCUGGUGUUGUGAAUCAGGCCG | 816 |
| miR-135a* | UAUAGGGAUUGGAGCCGUGGCG | 817 |
| miR-142-3p | UGUAGUGUUUCCUACUUUAUGGA | 818 |
| miR-145 | GUCCAGUUUUCCCAGGAAUCCCU | 819 |
| miR-146b-5p | UGAGAACUGAAUUCCAUAGGCU | 820 |
| miR-149* | AGGGAGGGACGGGGGCUGUGC | 821 |
| miR-150* | CUGGUACAGGCCUGGGGGACAG | 822 |
| miR-155 | UUAAUGCUAAUCGUGAUAGGGGU | 823 |
| miR-15a | UAGCAGCACAUAAUGGUUUGUG | 824 |
| miR-15b | UAGCAGCACAUCAUGGUUUACA | 825 |
| miR-16 | UAGCAGCACGUAAAUAUUGGCG | 826 |
| miR-17 | CAAAGUGCUUACAGUGCAGGUAG | 827 |
| miR-181a | AACAUUCAACGCUGUCGGUGAGU | 828 |
| miR-181b | AACAUUCAUUGCUGUCGGUGGGU | 829 |
| miR-181c | AACAUUCAACCUGUCGGUGAGU | 830 |
| miR-191 | CAACGGAAUCCCAAAAGCAGCUG | 831 |
| miR-195 | UAGCAGCACAGAAAUAUUGGC | 832 |
| miR-196b | UAGGUAGUUUCCUGUUGUUGGG | 833 |
| miR-198 | GGUCCAGAGGGGAGAUAGGUUC | 834 |
| miR-199a-3p | ACAGUAGUCUGCACAUUGGUUA | 835 |
| miR-199b-3p | ACAGUAGUCUGCACAUUGGUUA | 836 |
| miR-19a | UGUGCAAAUCUAUGCAAAACUGA | 837 |
| miR-19b | UGUGCAAAUCCAUGCAAAACUGA | 838 |
| miR-200b | UAAUACUGCCUGGUAAUGAUGA | 839 |
| miR-200c | UAAUACUGCCGGGUAAUGAUGGA | 840 |
| miR-205 | UCCUUCAUUCCACCGGAGUCUG | 841 |
| miR-20a | UAAAGUGCUUAUAGUGCAGGUAG | 842 |
| miR-20b | CAAAGUGCUCAUAGUGCAGGUAG | 843 |
| miR-21 | UAGCUUAUCAGACUGAUGUUGA | 844 |
| miR-22 | AAGCUGCCAGUUGAAGAACUGU | 845 |
| miR-221 | AGCUACAUUGUCUGCUGGGUUUC | 846 |
| miR-222 | AGCUACAUCUGGCUACUGGGU | 847 |
| miR-23a | AUCACAUUGCCAGGGAUUUCC | 848 |
| miR-23a* | GGGGUUCCUGGGGAUGGGAUUU | 849 |
| miR-23b | AUCACAUUGCCAGGGAUUACC | 850 |
| miR-24 | UGGCUCAGUUCAGCAGGAACAG | 851 |
| miR-25 | CAUUGCACUUGUCUCGGUCUGA | 852 |
| miR-25* | AGGCGGAGACUUGGGCAAUUG | 853 |
| miR-26a | UUCAAGUAAUCCAGGAUAGGCU | 854 |
| miR-26b | UUCAAGUAAUUCAGGAUAGGU | 855 |
| miR-27a | UUCACAGUGGCUAAGUUCCGC | 856 |
| miR-27b | UUCACAGUGGCUAAGUUCUGC | 857 |
| miR-298 | AGCAGAAGCAGGGAGGUUCUCCCA | 858 |
| miR-29a | UAGCACCAUCUGAAAUCGGUUA | 859 |
| miR-29b | UAGCACCAUUUGAAAUCAGUGUU | 860 |
| miR-29c | UAGCACCAUUUGAAAUCGGUUA | 861 |
| miR-29c* | UGACCGAUUUCUCCUGGUGUUC | 862 |
| miR-30a | UGUAAACAUCCUCGACUGGAAG | 863 |
| miR-30b | UGUAAACAUCCUACACUCAGCU | 864 |
| miR-30b* | CUGGGAGGUGGAUGUUUACUUC | 865 |
| miR-30c | UGUAAACAUCCUACACUCUCAGC | 866 |
| miR-30c-1* | CUGGGAGAGGGUUGUUUACUCC | 867 |
| miR-30c-2 | UGUAAACAUCCUACACUCUCAGC | 868 |
| miR-30d | UGUAAACAUCCCCGACUGGAAG | 869 |
| miR-30e | UGUAAACAUCCUUGACUGGAAG | 870 |
| miR-31 | AGGCAAGAUGCUGGCAUAGCU | 871 |
| miR-320a | AAAAGCUGGGUUGAGAGGGCGA | 872 |
| miR-331-3p | GCCCCUGGGCCUAUCCUAGAA | 873 |
| miR-335 | UCAAGAGCAAUAACGAAAAAUGU | 874 |
| miR-342-3p | UCUCACACAGAAAUCGCACCCGU | 875 |
| miR-370 | GCCUGCUGGGGUGGAACCUGGU | 876 |
| miR-371-5p | ACUCAAACUGUGGGGGCACU | 877 |
| miR-373* | ACUCAAAAUGGGGGCGCUUUCC | 878 |
| miR-375 | UUUGUUCGUUCGGCUCGCGUGA | 879 |
| miR-423-5p | UGAGGGGCAGAGAGCGAGACUUU | 880 |
| miR-424 | CAGCAGCAAUUCAUGUUUUGAA | 881 |
| miR-452 | AACUGUUUGCAGAGGAAACUGA | 882 |
| miR-483-5p | AAGACGGGAGGAAAGAAGGGAG | 883 |
| miR-486-3p | CGGGGCAGCUCAGUACAGGAU | 884 |
| miR-491-3p | CUUAUGCAAGAUUCCCUUCUAC | 885 |
| miR-491-5p | AGUGGGGAACCCUUCCAUGAGG | 886 |
| miR-494 | UGAAACAUACACGGGAAACCUC | 887 |
| miR-513a-5p | UUCACAGGGAGGUGUCAU | 888 |
| miR-513b | UUCACAAGGAGGUGUCAUUUAU | 889 |
| miR-516a-5p | UUCUCGAGGAAAGAAGCACUUUC | 890 |
| miR-550 | AGUGCCUGAGGGAGUAAGAGCCC | 891 |
| miR-557 | GUUUGCACGGGUGGGCCUUGUCU | 892 |
| miR-575 | GAGCCAGUUGGACAGGAGC | 893 |
| miR-612 | GCUGGGCAGGGCUUCUGAGCUCCUU | 894 |
| miR-614 | GAACGCCUGUUCUUGCCAGGUGG | 895 |
| miR-630 | AGUAUUCUGUACCAGGGAAGGU | 896 |
| miR-637 | ACUGGGGGCUUUCGGGCUCUGCGU | 897 |
| miR-638 | AGGGAUCGCGGGCGGGUGGCGGCCU | 898 |
| miR-658 | GGCGGAGGGAAGUAGGUCCGUUGGU | 899 |
| miR-663 | AGGCGGGGCGCCGCGGGACCGC | 900 |
| miR-671-5p | AGGAAGCCCUGGAGGGGCUGGAG | 901 |
| miR-675 | UGGUGCGGAGAGGGCCCACAGUG | 902 |
| miR-7 | UGGAAGACUAGUGAUUUUGUUGU | 903 |
| miR-708 | AAGGAGCUUACAAUCUAGCUGGG | 904 |
| miR-744 | UGCGGGGCUAGGGCUAACAGCA | 905 |
| miR-765 | UGGAGGAGAAGGAAGGUGAUG | 906 |
| miR-920 | GGGGAGCUGUGGAAGCAGUA | 907 |
| miR-923 | GUCAGCGGAGGAAAAGAAACU | 908 |
| miR-92a | UAUUGCACUUGUCCCGGCCUGU | 909 |
| miR-92a-2* | GGGUGGGGAUUUGUUGCAUUAC | 910 |
| miR-92b* | AGGGACGGGACGCGGUGCAGUG | 911 |
| miR-93 | CAAAGUGCUGUUCGUGCAGGUAG | 912 |
| miR-98 | UGAGGUAGUAAGUUGUAUUGUU | 913 |
| miR-99a | AACCCGUAGAUCCGAUCUUGUG | 914 |
| miR-99b | CACCCGUAGAACCGACCUUGCG | 915 |
| miR-200a | ACAUCGUUACCAGACAGUGUUA | 916 |
| miR-720 | UGGAGGCCCCAGCGAGA | 917 |
| miR-1202 | CUCCCCCACUGCAGCUGGCAC | 918 |
| miR-1249 | UGAAGAAGGGGGGGAAGGGCGU | 919 |
| miR-1275 | GACAGCCUCUCCCCCAC | 920 |
| miR-129-3p | AUGCUUUUUGGGGUAAGGGCUU | 921 |
| miR-1321 | AUCACAUUCACCUCCCUG | 922 |
| miR-1323 | AGAAAAUGCCCCUCAGUUUUGA | 923 |
| miR-376c | ACGUGGAAUUUCCUCUAUGUU | 924 |
| miR-429 | ACGGUUUUACCAGACAGUAUUA | 925 |

TABLE 5
Mature microRNA Sequences (5′-3′)

| | | SEQ |
|---|---|---|
| microRNA | sequence | ID NO |
| miR-1 | UGGAAUGUAAAGAAGUAUGUA | 926 |
| miR-9 | UCUUUGGUUAUCUAGCUGUAUGA | 927 |
| miR-9* | UAAAGCUAGAUAACCGAAAGU | 928 |
| miR-10a | UACCCUGUAGAUCCGAAUUUGUG | 929 |
| miR-10b | UACCCUGUAGAACCGAAUUUGU | 930 |
| miR-17-3p | ACUGCAGUGAAGGCACUUGU | 931 |
| miR-18 | UAAGGUGCAUCUAGUGCAGAUA | 932 |
| miR-20 | UAAAGUGCUUAUAGUGCAGGUA | 933 |
| miR-28 | AAGGAGCUCACAGUCUAUUGAG | 934 |
| miR-30a-3p | CUUUCAGUCGGAUGUUUGCAGC | 935 |
| miR-32 | UAUUGCACAUUACUAAGUUGC | 936 |
| miR-33 | GUGCAUUGUAGUUGCAUUG | 937 |
| miR-34a | UGGCAGUGUCUUAGCUGGUUGU | 938 |
| miR-34b | AGGCAGUGUCAUUAGCUGAUUG | 939 |
| miR-34c | AGGCAGUGUAGUUAGCUGAUUG | 940 |
| miR-92 | UAUUGCACUUGUCCCGGCCUGU | 941 |
| miR-95 | UUCAACGGGUAUUUAUUGAGCA | 942 |
| miR-96 | UUUGGCACUAGCACAUUUUUGC | 943 |
| miR-101 | UACAGUACUGUGAUAACUGAAG | 944 |
| miR-105 | UCAAAUGCUCAGACUCCUGU | 945 |
| miR-122a | UGGAGUGUGACAAUGGUGUUUGU | 946 |
| miR-124a | UUAAGGCACGCGGUGAAUGCCA | 947 |
| miR-126* | CAUUAUUACUUUUGGUACGCG | 948 |
| miR-127 | UCGGAUCCGUCUGAGCUUGGCU | 949 |
| miR-128a | UCACAGUGAACCGGUCUCUUUU | 950 |
| miR-128b | UCACAGUGAACCGGUCUCUUUC | 951 |
| miR-129 | CUUUUUGCGGUCUGGGCUUGC | 952 |
| miR-132 | UAACAGUCUACAGCCAUGGUCG | 953 |
| miR-133a | UUGGUCCCCUUCAACCAGCUGU | 954 |
| miR-133b | UUGGUCCCCUUCAACCAGCUA | 955 |
| miR-135a | UAUGGCUUUUUAUUCCUAUGUGA | 956 |
| miR-135b | UAUGGCUUUUCAUUCCUAUGUG | 957 |
| miR-136 | ACUCCAUUUGUUUUGAUGAUGGA | 958 |
| miR-137 | UAUUGCUUAAGAAUACGCGUAG | 959 |
| miR-139 | UCUACAGUGCACGUGUCU | 960 |
| miR-140 | AGUGGUUUUACCCUAUGGUAG | 961 |
| miR-141 | AACACUGUCUGGUAAAGAUGG | 962 |
| miR-142-5p | CAUAAAGUAGAAAGCACUAC | 963 |
| miR-143 | UGAGAUGAAGCACUGUAGCUCA | 964 |
| miR-144 | UACAGUAUAGAUGAUGUACUAG | 965 |
| miR-146 | UGAGAACUGAAUUCCAUGGGUU | 966 |
| miR-147 | GUGUGUGGAAAUGCUUCUGC | 967 |
| miR-148a | UCAGUGCACUACAGAACUUUGU | 968 |
| miR-148b | UCAGUGCAUCACAGAACUUUGU | 969 |
| miR-149 | UCUGGCUCCGUGUCUUCACUCC | 970 |
| miR-150 | UCUCCCAACCCUUGUACCAGUG | 971 |
| miR-151 | ACUAGACUGAAGCUCCUUGAGG | 972 |
| miR-152 | UCAGUGCAUGACAGAACUUGG | 973 |
| miR-153 | UUGCAUAGUCACAAAAGUGA | 974 |
| miR-154 | UAGGUUAUCCGUGUUGCCUUCG | 975 |
| miR-154* | AAUCAUACACGGUUGACCUAUU | 976 |
| miR-182 | UUUGGCAAUGGUAGAACUCACA | 977 |
| miR-182* | UGGUUCUAGACUUGCCAACUA | 978 |
| miR-183 | UAUGGCACUGGUAGAAUUCACUG | 979 |
| miR-184 | UGGACGGAGAACUGAUAAGGGU | 980 |
| miR-185 | UGGAGAGAAAGGCAGUUC | 981 |
| miR-186 | CAAAGAAUUCUCCUUUUGGGCUU | 982 |
| miR-187 | UCGUGUCUUGUGUUGCAGCCG | 983 |
| miR-188 | CAUCCCUUGCAUGGUGGAGGGU | 984 |
| miR-189 | GUGCCUACUGAGCUGAUAUCAGU | 985 |
| miR-190 | UGAUAUGUUUGAUAUAUUAGGU | 986 |
| miR-192 | CUGACCUAUGAAUUGACAGCC | 987 |
| miR-193 | AACUGGCCUACAAAGUCCCAG | 988 |
| miR-194 | UGUAACAGCAACUCCAUGUGGA | 989 |
| miR-196a | UAGGUAGUUUCAUGUUGUUGG | 990 |
| miR-197 | UUCACCACCUUCUCCACCCAGC | 991 |
| miR-200a | UAACACUGUCUGGUAACGAUGU | 992 |
| miR-202 | AGAGGUAUAGGGCAUGGGAAGA | 993 |
| miR-203 | GUGAAAUGUUUAGGACCACUAG | 994 |
| miR-204 | UUCCCUUUGUCAUCCUAUGCCU | 995 |
| miR-206 | UGGAAUGUAAGGAAGUGUGUGG | 996 |
| miR-208 | AUAAGACGAGCAAAAAGCUUGU | 997 |
| miR-210 | CUGUGCGUGUGACAGCGGCUG | 998 |
| miR-211 | UUCCCUUUGUCAUCCUUCGCCU | 999 |
| miR-212 | UAACAGUCUCCAGUCACGGCC | 1000 |
| miR-213 | ACCAUCGACCGUUGAUUGUACC | 1001 |
| miR-214 | ACAGCAGGCACAGACAGGCAG | 1002 |
| miR-215 | AUGACCUAUGAAUUGACAGAC | 1003 |
| miR-216 | UAAUCUCAGCUGGCAACUGUG | 1004 |
| miR-217 | UACUGCAUCAGGAACUGAUUGGAU | 1005 |
| miR-218 | UUGUGCUUGAUCUAACCAUGU | 1006 |
| miR-219 | UGAUUGUCCAAACGCAAUUCU | 1007 |
| miR-220 | CCACACCGUAUCUGACACUUU | 1008 |
| miR-223 | UGUCAGUUUGUCAAAUACCCC | 1009 |
| miR-224 | CAAGUCACUAGUGGUUCCGUUUA | 1010 |
| miR-296 | AGGGCCCCCCCUCAAUCCUGU | 1011 |
| miR-299 | UGGUUUACCGUCCCACAUACAU | 1012 |
| miR-301 | CAGUGCAAUAGUAUUGUCAAAGC | 1013 |
| miR-302a | UAAGUGCUUCCAUGUUUUGGUGA | 1014 |
| miR-302b* | ACUUUAACAUGGAAGUGCUUUCU | 1015 |
| miR-302b | UAAGUGCUUCCAUGUUUUAGUAG | 1016 |
| miR-302c* | UUUAACAUGGGGGUACCUGCUG | 1017 |
| miR-302c | UAAGUGCUUCCAUGUUUCAGUGG | 1018 |
| miR-302d | UAAGUGCUUCCAUGUUUGAGUGU | 1019 |
| miR-320 | AAAAGCUGGGUUGAGAGGGCGAA | 1020 |
| miR-321 | UAAGCCAGGGAUUGUGGGUUC | 1021 |
| miR-323 | GCACAUUACACGGUCGACCUCU | 1022 |
| miR-324-5p | CGCAUCCCCUAGGGCAUUGGUGU | 1023 |
| miR-324-3p | CCACUGCCCCAGGUGCUGCUGG | 1024 |
| miR-325 | CCUAGUAGGUGUCCAGUAAGU | 1025 |
| miR-326 | CCUCUGGGCCCUUCCUCCAG | 1026 |
| miR-328 | CUGGCCCUCUCUGCCCUUCCGU | 1027 |
| miR-330 | GCAAAGCACACGGCCUGCAGAGA | 1028 |
| miR-331 | GCCCCUGGGCCUAUCCUAGAA | 1029 |
| miR-337 | UCCAGCUCCUAUAUGAUGCCUUU | 1030 |
| miR-338 | UCCAGCAUCAGUGAUUUUGUUGA | 1031 |
| miR-339 | UCCCUGUCCUCCAGGAGCUCA | 1032 |
| miR-340 | UCCGUCUCAGUUACUUUAUAGCC | 1033 |
| miR-342 | UCUCACACAGAAAUCGCACCCGUC | 1034 |
| miR-345 | UGCUGACUCCUAGUCCAGGGC | 1035 |
| miR-346 | UGUCUGCCCGCAUGCCUGCCUCU | 1036 |
| miR-367 | AAUUGCACUUUAGCAAUGGUGA | 1037 |
| miR-368 | ACAUAGAGGAAAUUCCACGUUU | 1038 |
| miR-369 | AAUAAUACAUGGUUGAUCUUU | 1039 |
| miR-371 | GUGCCGCCAUCUUUUGAGUGU | 1040 |
| miR-372 | AAAGUGCUGCGACAUUUGAGCGU | 1041 |
| miR-373 | GAAGUGCUUCGAUUUUGGGGUGU | 1042 |
| miR-374 | UUAUAAUACAACCUGAUAAGUG | 1043 |
| miR-320c | AAAAGCUGGGUUGAGAGGGU | 2692 |

TABLE 6
Up-regulated target RNAs for detection of non-small cell lung cancer

| | Probe SEQ | Fold changes v. normal Lung | | | | | | | | | |
|---|---|---|---|---|---|---|---|---|---|---|---|
| Array Probe | ID NO. | Epi4 | Epi7 | Epi5 | Adk1 | Adk3 | Adk11 | Adk8 | Adk9 | Adk2 | Adk10 |
| miR-21 | 196 | −2.52 | 1.77 | −1.51 | 1.45 | 1.41 | 3.51 | 2.27 | 3.43 | 5.38 | 1.25 |
| miR-765 | 246 | 25.46 | 3.15 | 3.08 | 6.06 | −1.58 | 3.70 | 1.82 | 3.00 | −1.58 | 1.02 |
| 4037-R3-2 | 15 | 6.57 | 1.44 | −1.28 | 2.17 | −1.28 | 2.17 | 2.34 | 2.64 | 6.81 | −1.06 |
| miR-27b | 205 | −1.11 | 2.20 | 2.52 | −1.91 | 1.18 | 1.64 | 1.24 | 2.05 | 6.50 | −1.85 |
| miR-29a | 207 | −2.68 | 1.00 | 3.18 | 1.50 | −1.90 | 2.13 | 1.41 | 1.23 | 2.18 | −2.96 |
| miR-923 | 248 | 6.70 | 1.19 | 1.24 | 1.35 | −2.18 | 1.11 | −1.43 | 1.19 | 2.00 | −2.79 |
| miR-199a-3p | 191 | −3.52 | 1.40 | 1.43 | −1.94 | 1.72 | 1.56 | 1.33 | 1.59 | 2.97 | −4.20 |
| miR-331-3p | 219 | −1.21 | −1.21 | 2.17 | 1.42 | 1.24 | 1.47 | 1.27 | −1.21 | −1.21 | 1.36 |
| miR-23a | 197 | 1.38 | 2.90 | −4.40 | 1.37 | −4.40 | 2.28 | −4.40 | 2.38 | 7.76 | −2.09 |
| miR-146b-5p | 184 | −1.89 | 1.12 | 2.44 | −1.89 | −1.89 | 2.71 | 1.07 | 1.30 | 2.48 | −1.21 |
| miR-483-5p | 225 | 24.38 | 1.51 | 1.68 | 5.17 | −1.54 | 1.11 | −1.64 | 3.19 | −1.54 | −1.03 |
| 9733-L3-1 | 129 | 7.61 | 3.56 | −1.48 | 2.44 | −1.48 | −1.48 | 1.07 | 1.69 | −1.48 | 1.33 |
| miR-30c-1* | 214 | 39.98 | −1.58 | 1.57 | 7.84 | −1.58 | −1.58 | −1.42 | 2.67 | −1.58 | −1.58 |
| 4593-R3-1 | 26 | 8.31 | 2.80 | 1.23 | 1.93 | −4.73 | −2.65 | −5.00 | 1.79 | −9.77 | 1.20 |
| 8433_C-R4-1 | 164 | 24.29 | 1.73 | 1.87 | 5.70 | −1.45 | −1.45 | −1.45 | 1.95 | −1.45 | 1.13 |
| 4855-R3-1 | 30 | 8.26 | 1.91 | 1.44 | 1.78 | −3.56 | −1.50 | −1.81 | 1.87 | −2.80 | 1.20 |
| 4666-R4-1 | 27 | 24.77* | 2.27 | 3.49* | 7.40* | −2.36 | −1.70 | −2.05 | 2.37 | −3.62 | −1.01 |

TABLE 7
Target RNAs more frequently present at elevated levels in squamous cell
carcinoma (SCC)

| | | Number of | | | | |
|---|---|---|---|---|---|---|
| | Fold | adenocarcinomas | Number of | | Pre- | |
| | change | with | SCC with | Probe | microRNA | |
| | average in | increased | increased | SEQ ID | SEQ ID | microRNA |
| Gene | SCC | levels | levels | NO | NO | SEQ ID NO |
| 10366-R3-2 | 4.1 | 1 | 6 | 145 | 539 | |
| 12223-L5-1 | 3.2 | 2 | 5 | 2110 | 2234 | 2584 |
| 12907-L5-1 | 6.4 | 0 | 5 | 1106 | 1228 | |
| 12911-L5-1 | 3.2 | 2 | 5 | 2115 | 2239 | 2590 |
| 12917-R5-2 | 6.0 | 1 | 6 | 1108 | 1230 | |
| 13108-L5-2 | 3.3 | 1 | 5 | 2673 | 2681 | 2595 |
| 13122-L5-1 | 11.5 | 2 | 7 | 1066 | 1242 | 2597 |
| 13272-R5-2 | 4.0 | 1 | 5 | 2674 | 2682 | 2611 |
| 13316-R5-2 | 2.8 | 0 | 5 | 2675 | 2683 | 2616 |
| 13331-L5-2 | 4.1 | 1 | 5 | 2676 | 2684 | 2617 |
| 13499-R5-1 | 3.3 | 2 | 5 | 2677 | 2685 | 2634 |
| 3923-R5-1 | 5.3 | 3 | 7 | 1070 | 1273 | 2647 |
| 4261-R5-1 | 6.4 | 0 | 5 | 1148 | 1277 | |
| 4479-R3-1 | 4.3 | 1 | 6 | 25 | 421 | |
| 5232-L5-2 | 5.2 | 0 | 5 | 1154 | 1287 | 2653 |
| 5392-R5-1 | 7.0 | 2 | 5 | 1155 | 1288 | 2654 |
| 5971-R5-2 | 2.6 | 1 | 5 | 2678 | 2686 | 2657 |
| 6183-R5-1 | 2.8 | 0 | 5 | 2149 | 2274 | |
| 7026-L3-1 | 2.8 | 1 | 5 | 2679 | 2687 | |
| 7292-L3-2 | 3.5 | 2 | 6 | 80 | 476 | |
| 7471-L5-1 | 4.5 | 1 | 5 | 2680 | 2688 | |
| 8004-R3-2 | 11.0 | 2 | 6 | 97 | 492 | |
| 8316-R5-1 | 20.3 | 1 | 5 | 1177 | 1315 | |
| 9349-R5-2 | 24.4 | 3 | 6 | 1080 | 1325 | 2672 |
| 9594-R5-1 | 9.7 | 2 | 6 | 1081 | 1328 | |
| miR-1323 | 4.9 | 2 | 6 | 1197 | 1338 | 923 |
| miR-205 | 21.2 | 3 | 7 | 195 | 694 | 841 |
| miR-675 | 2.9 | 2 | 5 | 243 | 743 | 902 |
| miR-923 | 3.5 | 3 | 6 | 248 | 748 | 908 |

TABLE 8
Target RNAs more frequently present at elevated levels in adenocarcinoma

| | | Number of | Number of | | Pre- | |
|---|---|---|---|---|---|---|
| | Fold change | adenocarcinomas | SCC with | Probe | microRNA | microRNA |
| | average in | with increased | increased | SEQ ID | SEQ ID | SEQ ID |
| Gene | adenocarcinoma | levels | levels | NO | NO | NO |
| 13252-L5-3 | 4.9 | 5 | 1 | 1123 | 1249 | 2609 |
| 13373-R5-2 | 5.1 | 5 | 3 | 1130 | 1257 | 2624 |
| 9798-L5-1 | 9.9 | 5 | 3 | 1188 | 1329 | |
| miR-106b | 4.5 | 5 | 2 | 363 | 757 | 805 |
| miR-20b | 4.8 | 6 | 2 | 1086 | 1349 | 843 |
| miR-92a | 4.0 | 4 | 0 | 2180 | 2307 | 909 |
| miR-93 | 3.8 | 5 | 1 | 251 | 751 | 912 |

TABLE 9
Target RNAs present at increased levels
in aggressive forms of lung cancer

| | Probe | | |
|---|---|---|---|
| | SEQ | Pre-microRNA | microRNA |
| Gene | ID NO | SEQ ID NO(s) | SEQ ID NO |
| 10083-L5-1 | 1090 | 1211 | |
| 10233-R5-1 | 1091 | 1212 | 2576 |
| 10455-L5-1 | 1063 | 1215 | 2578 |
| 11444-L5-3 | 1097 | 1219 | |
| 12729-R5-1 | 1103 | 1225 | |
| 12888-L5-2 | 1105 | 1227 | |
| 12907-L5-1 | 1106 | 1228 | |
| 12917-R5-2 | 1108 | 1230 | |
| 12947-L5-4 | 1064 | 1231 | |
| 12974-R5-2 | 1110 | 1233 | 2592 |
| 12979-R5-2 | 1111 | 1234 | |
| 13001-L5-1 | 1113 | 1236 | |
| 13070-R5-3 | 1115 | 1238 | |
| 13122-L5-1 | 1066 | 1242 | 2597 |
| 13185-L5-3 | 1118 | 1243 | 2603 |
| 13219-L5-1 | 1067 | 1245 | |
| 13245-L5-4 | 1122 | 1248 | 2607 |
| 13274-L5-3 | 1124 | 1251 | 2612 |
| 13357-L5-4 | 1128 | 1255 | 2621 |
| 13398-R5-4 | 1132 | 1259 | 2627 |
| 13467-L5-1 | 1069 | 1262 | 2630 |
| 13468-L5-1 | 1135 | 1263 | 2631 |
| 13470-R5-1 | 1136 | 1264 | |
| 13473-L5-3 | 1137 | 1265 | 2633 |
| 13500-L5-3 | 138 | 1266 | 2635, 2636 |
| 3744-R5-1 | 1143 | 1271 | 2645, 2646 |
| 3875-R5-2 | 1144 | 1272 | |
| 3992-R5-1 | 1146 | 1275 | |
| 4790-L5-2 | 1150 | 1282 | |
| 5080-R3-1 | 1073 | 1285 | 2650 |
| 5108-R5-2 | 1153 | 1286 | |
| 5392-R5-1 | 1155 | 1288 | 2654 |
| 6037-R3-2 | 1159 | 1292 | 2658 |
| 6181-L5-1 | 1160 | 1293 | |
| 6233-L5-2 | 1161 | 1295 | |
| 6235-R5-2 | 1075 | 1296 | 2661 |
| 6474-L5-1 | 1164 | 1299 | |
| 6602-R3-1 | 1165 | 1300 | |
| 6683-R5-1 | 1167 | 1302 | |
| 6906-L5-1 | 1172 | 1307 | 2666 |
| 6930-R5-1 | 1173 | 1308 | 2667 |
| 7764-R3-2 | 1175 | 1312 | |
| 8004-R3-2 | 97 | 492 | |
| 8316-R5-1 | 1177 | 1315 | |
| 836-R5-2 | 1079 | 1316 | |
| 8433_C-R4-1 | 1177 | 1317 | |
| 8808-R5-1 | 1183 | 1322 | |
| 9349-R5-2 | 1080 | 1325 | 2672 |
| 9594-R5-1 | 1081 | 1328 | |
| miR-198 | 1202 | 1343 | 834 |
| miR-298 | 1088 | 1351 | 858 |
| miR-30c-1* | 1204 | 1352 | 867 |
| miR-320c | 2689 | 2690, 2691 | 2692 |
| miR-516a-5p | 1209 | 1357 | 890 |
| miR-765 | 246 | 746 | 906 |

[0050] In some embodiments, target RNAs can be measured in samples collected at one or more times from a patient to monitor the status or progress of lung cancer in the patient.

[0051] In some embodiments, a sample to be tested is obtained using one or more techniques commonly used for collecting lung tissue, e.g., bronchoscopy, bronchial washing, brushing, or transbronchial needle aspiration. In some embodiments, the sample is obtained from a patient without lesions by bronchoalveolar lavage, i.e., washing the airways with saline, to obtain cells. In some embodiments, the sample is obtained by biopsy, such as computed tomography (CT)-aided needle biopsy.

[0052] In some embodiments, the sample to be tested is a bodily fluid, such as blood, sputum, mucus, saliva, urine, semen, etc. In some embodiments, a sample to be tested is a blood sample. In some embodiments, the blood sample is whole blood. In some embodiments, the blood sample is a sample of blood cells. In some embodiments, the blood sample is plasma. In some embodiments, the blood sample is serum.

[0053] The clinical sample to be tested is, in some embodiments, freshly obtained. In other embodiments, the sample is a fresh frozen specimen. In some embodiments, the sample is a tissue sample, such as a formalin-fixed paraffin embedded sample. In some embodiments, the sample is a liquid cytology sample.

[0054] In some embodiments, the methods described herein are used for early detection of lung cancer in a sample of lung cells, such as those obtained by routine bronchoscopy. In some embodiments, the methods described herein are used for early detection of lung cancer in a sample of blood or serum.

[0055] In some embodiments, the clinical sample to be tested is obtained from individuals who have one or more of the following risk factors: history of smoking, over 45 years of age, exposure to radon gas, secondhand smoke or occupational carcinogens (e.g., asbestos, radiation, arsenic, chromates, nickel, chloromethyl ethers, mustard gas, or coke-oven emissions), or lungs scarred by prior disease such as tuberculosis. In some embodiments, the clinical sample is obtained from individuals who have diagnostic signs or clinical symptoms that may be associated with lung cancer, such as abnormal chest x-ray and/or computed tomography (“CT”) scan, cough, localized chest pain, or hoarseness.

[0056] Thus, in some embodiments, methods described herein can be used for routine screening of healthy individuals with no risk factors. In some embodiments, methods described herein are used to screen asymptomatic individuals having one or more of the above-described risk factors.

[0057] In some embodiments, the methods described herein can be used to assess the effectiveness of a treatment for lung cancer in a patient. In some embodiments, the target RNA expression levels are determined at various times during the treatment, and are compared to target RNA expression levels from an archival sample taken from the patient, e.g., by bronchoscopy, before the manifestation of any signs of lung cancer or before beginning treatment. In some embodiments, the target RNA expression levels are compared to target RNA expression levels from an archival sample of normal tissue taken from the patient, i.e., a sample of tissue taken from a tumor-free part of the patient's lung by biopsy. Ideally, target RNA expression levels in the normal sample evidence no aberrant changes in target RNA expression levels. Thus, in such embodiments, the progress of treatment of an individual with lung cancer can be assessed by comparison to a sample of lung cells from the same individual when he was healthy or prior to beginning treatment, or by comparison to a sample of healthy lung cells from the same individual.

[0058] In embodiments in which the method comprises detecting expression of more than one target RNA, the expression levels of the plurality of target RNAs may be detected concurrently or simultaneously in the same assay reaction. In some embodiments, expression levels are detected concurrently or simultaneously in separate assay reactions. In some embodiments, expression levels are detected at different times, e.g., in serial assay reactions.

[0059] In some embodiments, a method comprises detecting the level of at least one target RNA in a sample from a subject, wherein detection of a level of at least one target RNA that is greater than a normal level of the at least one target RNA indicates the presence of lung cancer in the subject. In some embodiments, a method comprises detecting the level of at least one target RNA in a sample from a subject and comparing the level of the at least one target RNA in the sample to a normal level of the at least one target RNA, wherein a level of at least one target RNA in the sample that is greater than a normal level of the at least one target RNA indicates the presence of lung cancer in the subject.

[0060] In some embodiments, a method of facilitating diagnosis of lung cancer in a subject is provided. Such methods comprise detecting the level of at least one target RNA in a sample from the subject. In some embodiments, information concerning the level of at least one target RNA in the sample from the subject is communicated to a medical practitioner. A “medical practitioner,” as used herein, refers to an individual or entity that diagnoses and/or treats patients, such as a hospital, a clinic, a physician's office, a physician, a nurse, or an agent of any of the aforementioned entities and individuals. In some embodiments, detecting the level of at least one target RNA is carried out at a laboratory that has received the subject's sample from the medical practitioner or agent of the medical practitioner. The laboratory carries out the detection by any method, including those described herein, and then communicates the results to the medical practitioner. A result is “communicated,” as used herein, when it is provided by any means to the medical practitioner. In some embodiments, such communication may be oral or written, may be by telephone, in person, by e-mail, by mail or other courier, or may be made by directly depositing the information into, e.g., a database accessible by the medical practitioner, including databases not controlled by the medical practitioner. In some embodiments, the information is maintained in electronic form. In some embodiments, the information can be stored in a memory or other computer readable medium, such as RAM, ROM, EEPROM, flash memory, computer chips, digital video discs (DVD), compact discs (CDs), hard disk drives (HDD), magnetic tape, etc.

[0061] In some embodiments, methods of detecting the presence lung cancer are provided. In some embodiments, methods of diagnosing lung cancer are provided. In some embodiments, the method comprises obtaining a sample from a subject and providing the sample to a laboratory for detection of at least one target RNA level in the sample. In some embodiments, the method further comprises receiving a communication from the laboratory that indicates the at least one target RNA level in the sample. In some embodiments, lung cancer is present if the level of at least one target RNA in the sample is greater than a normal level of the at least one target RNA. A “laboratory,” as used herein, is any facility that detects the level of at least one target RNA in a sample by any method, including the methods described herein, and communicates the level to a medical practitioner. In some embodiments, a laboratory is under the control of a medical practitioner. In some embodiments, a laboratory is not under the control of the medical practitioner.

[0062] When a laboratory communicates the level of at least one target RNA to a medical practitioner, in some embodiments, the laboratory communicates a numerical value representing the level of at least one target RNA in the sample, with or without providing a numerical value for a normal level. In some embodiments, the laboratory communicates the level of at least one target RNA by providing a qualitative value, such as “high,” “elevated,” etc.

[0063] As used herein, when a method relates to detecting lung cancer, determining the presence of lung cancer, and/or diagnosing lung cancer, the method includes activities in which the steps of the method are carried out, but the result is negative for the presence of lung cancer. That is, detecting, determining, and diagnosing lung cancer include instances of carrying out the methods that result in either positive or negative results (e.g., whether target RNA levels are normal or greater than normal).

[0064] As used herein, the term “subject” means a human. In some embodiments, the methods described herein may be used on samples from non-human animals.

[0065] The common, or coordinate, expression of target RNAs that are physically proximal to one another in the genome permits the informative use of such chromosome-proximal target RNAs in methods herein.

[0066] Table 3 identifies the chromosomal location of each of the 397 target RNAs capable of specifically hybridizing to a nucleic acid comprising a sequence that is identically present in one of SEQ ID NOs: 1 to 397 in Tables 1 and 2. Table 22 identifies the chromosomal location of the target RNAs capable of specifically hybridizing to a nucleic acid comprising a sequence that is identically present in one of SEQ ID NOs: 1063 to 1210 in Tables 18 and 20. Table 25 identifies the chromosomal location of the target RNAs capable of specifically hybridizing to a nucleic acid comprising a sequence that is identically present in one of SEQ ID NOs: 1363 to 1707 in Table 23. Table 29 identifies the chromosomal location of the target RNAs capable of specifically hybridizing to a nucleic acid comprising a sequence that is identically present in one of SEQ ID NOs: 2064 to 2183 in Tables 27 and 28. Table 31 identifies the chromosomal location of the target RNAs capable of specifically hybridizing to a nucleic acid comprising a sequence that is identically present in one of SEQ ID NOs: 2312 to 2452 in Table 30. Thus, in some embodiments, the level of expression of one or more target RNAs located within about 1 kilobase (kb), within about 2 kb, within about 5 kb, within about 10 kb, within about 20 kb, within about 30 kb, within about 40 kb, and even within about 50 kb of the chromosomal locations in Tables 3, 22, 25, 29, and 31 is detected in lieu of, or in addition to, measurement of expression of the respective tabulated target RNAs in the methods described herein. See Baskerville, S, and Bartel D. P. (2005) RNA 11:241-247.

[0067] In some embodiments, in combination with detecting one or more target RNAs capable of specifically hybridizing to a nucleic acid comprising a sequence selected from SEQ ID NOs: 1 to 397, 1063 to 1210, 1363 to 1707, 2064 to 2183, 2312 to 2452, 2673 to 2680, and 2689 and/or detecting one or more target RNAs comprising at least 15 contiguous nucleotides of a sequence selected from SEQ ID NOs: 794 to 1043, 2576 to 2672, and 2692 and/or detecting one or more target RNAs that comprise a sequence that is complementary to at least 15 contiguous nucleotides of a sequence selected from SEQ ID NOs: 1 to 397, 1063 to 1210, 1363 to 1707, 2064 to 2183, 2312 to 2452, 2673 to 2680, and 2689, methods herein further comprise detecting the level(s) of expression of at least one microRNA from the human miRNome.

[0068] In some embodiments, at least one target RNA is capable of specifically hybridizing to a nucleic acid comprising a sequence selected from SEQ ID NOs: 1 to 397, 1063 to 1210, 1363 to 1707, 2064 to 2183, 2312 to 2452, 2673 to 2680, and 2689. In some embodiments, at least one target RNA comprises at least 15 contiguous nucleotides that are complementary to at least a portion of a sequence selected from SEQ ID NOs: 1 to 397, 1063 to 1210, 1363 to 1707, 2064 to 2183, 2312 to 2452, 2673 to 2680, and 2689. In some embodiments, at least one target RNA comprises at least 15 contiguous nucleotides of a sequence selected from SEQ ID NOs: 794 to 1043, 2576 to 2672, and 2692. In some embodiments, a target RNA, in its mature form, comprises fewer than 30 nucleotides. In some embodiments, a target RNA is a microRNA.

[0069] In some embodiments, more than one target RNA is detected simultaneously in a single reaction. In some embodiments, at least 2, at least 3, at least 5, or at least 10 target RNAs are detected simultaneously in a single reaction. In some embodiments, all target RNAs are detected simultaneously in a single reaction.

[0070] In some embodiments, an increased level of one or more target RNAs capable of specifically hybridizing to a nucleic acid comprising a sequence selected from SEQ ID NOs: 1 to 397, 1063 to 1210, 2064 to 2183, 2673 to 2680, and 2689 in a sample is indicative of the presence of lung cancer in an individual from whom the sample has been taken. In some embodiments, an increased level of one or more target RNAs that comprise at least 15 contiguous nucleotides that are complementary to at least a portion of a sequence selected from SEQ ID NO: 1 to 397, 1063 to 1210, 2064 to 2183, 2673 to 2680, and 2689 in a sample is indicative of the presence of lung cancer in an individual from whom the sample has been taken. In some embodiments, an increased level of one or more target RNAs that comprise at least 15 contiguous nucleotides of a sequence selected from SEQ ID NOs: 794 to 1043, 2576 to 2672, and 2692 in a sample is indicative of the presence of lung cancer in an individual from whom the sample has been taken. In some embodiments, a decreased level of one or more target RNAs capable of specifically hybridizing to a nucleic acid comprising a sequence selected from SEQ ID NOs: 1 to 397, 1363 to 1707, and 2312 to 2452 in a sample is indicative of the presence of lung cancer in an individual from whom the sample has been taken. In some embodiments, a decreased level of one or more target RNAs that comprise at least 15 contiguous nucleotides that are complementary to at least a portion of a sequence selected from SEQ ID NO: 1 to 397, 1363 to 1707, and 2312 to 2452 in a sample is indicative of the presence of lung cancer in an individual from whom the sample has been taken. In some embodiments, a decreased level of one or more target RNAs that comprise at least 15 contiguous nucleotides of a sequence selected from SEQ ID NOs: 794 to 1043, 2576 to 2672, and 2692 in a sample is indicative of the presence of lung cancer in an individual from whom the sample has been taken.

[0071] In some embodiments, an increased level of one or more target RNAs capable of specifically hybridizing to a polynucleotide sequence in Table 6 is indicative of the presence of non-small cell lung cancer.

[0072] In some embodiments, an increased level of one or more target RNAs capable of specifically hybridizing to a polynucleotide sequence in Table 7 is indicative of squamous cell carcinoma.

[0073] In some embodiments, an increased level of one or more target RNAs capable of specifically hybridizing to a polynucleotide sequence in Table 8 is indicative of adenocarcinoma.

[0074] In some embodiments, an increased level of one or more target RNAs capable of specifically hybridizing to a polynucleotide sequence in Table 9 is indicative of aggressive lung cancer.

[0075] In some embodiments, an increased level of one or more target RNAs capable of specifically hybridizing to a polynucleotide sequence in Table 32 or 33 is indicative of lung cancer.

[0076] In some embodiments, a decreased level of one or more target RNAs capable of specifically hybridizing to a polynucleotide sequence in Table 34 is indicative of lung cancer.

[0077] In some embodiments, an increased level of one or more target RNAs capable of specifically hybridizing to a sequence selected from SEQ ID NOs: 15, 26, 27, 30, 129, 164, 184, 191, 196, 197, 205, 207, 214, 219, 225, 246, and 248 is indicative of non-small cell lung cancer.

[0078] In some embodiments, an increased level of one or more target RNAs capable of specifically hybridizing to a sequence selected from SEQ ID NOs: 15, 26, 27 and 191 and decreased level of one or more target RNAs capable of specifically hybridizing to a sequence selected from SEQ ID NOs: 92 and 171 is indicative of squamous cell carcinoma or adenocarcinoma.

[0079] In some embodiments, an increased level of one or more target RNAs capable of specifically hybridizing to a sequence selected from SEQ ID NOs: 4, 36, 50, 93, 122, 125, 139, 140, 144, 146, 159, 226, 239 and 241 is indicative of squamous cell carcinoma or adenocarcinoma.

[0080] In some embodiments, an increased level of one or more target RNAs capable of specifically hybridizing to a sequence selected from SEQ ID NOs: 19, 27, 33, 48, 55, 72, 73, 94, 101, 105, 112, 117, 130, 131, 133, 134, 135, 143, 155, 158, 160, 161, 163, 165, 221, 238, 240 and 246 is indicative of squamous cell carcinoma.

[0081] In some embodiments, a decreased level of one or more target RNAs capable of specifically hybridizing to a sequence selected from SEQ ID NOs: 19, 27, 33, 48, 55, 72, 73, 94, 101, 105, 112, 117, 130, 131, 133, 134, 135, 143, 155, 158, 160, 161, 163, 165, 221, 238, 240 and 246 is indicative of adenocarcinoma.

[0082] In some embodiments, an increased level of one or more target RNAs capable of specifically hybridizing to a sequence selected from SEQ ID NOs: 27, 72, 73, 161 or 246 is indicative of an aggressive form of adenocarcinoma.

[0083] 4.1.2. Exemplary Controls

[0084] In some embodiments, a normal level (a “control”) for each target RNA can be determined as an average level or range that is characteristic of normal human lung cells or other reference material, against which the level measured in the sample can be compared. The determined average or range of target RNA in normal subjects can be used as a benchmark for detecting above-normal or below-normal levels of target RNA indicative of lung cancer. In some embodiments, normal levels of target RNA can be determined using individual or pooled RNA-containing samples from one or more individuals, such as from normal lung tissue from patients undergoing surgical resection for stage I, II or MA non-small cell lung cancer.

[0085] In some embodiments, determining a normal level of expression of a target RNA comprises detecting a complex comprising a probe hybridized to a nucleic acid selected from a target RNA, a DNA amplicon of the target RNA, and a complement of the target RNA. That is, in some embodiments, a normal level of expression can be determined by detecting a DNA amplicon of the target RNA, or a complement of the target RNA rather than the target RNA itself. In some embodiments, a normal level of such a complex is determined and used as a control. The normal level of the complex, in some embodiments, correlates to the normal level of the target RNA. Thus, when a normal level of a target is discussed herein, that level can, in some embodiments, be determined by detecting such a complex.

[0086] In some embodiments, a control comprises RNA from cells of a single individual, e.g., from normal tissue from a patient undergoing surgical resection for stage I, II or MA non-small cell lung cancer. In some embodiments, the control is drawn from anatomically and/or cytologically normal areas of the lung of the individual from whom the test sample was obtained. In some embodiments, a control comprises RNA from a pool of cells from multiple individuals. In some embodiments, a control comprises RNA from a pool of blood, such as whole blood or serum, from multiple individuals. In some embodiments, a control comprises commercially-available human RNA, such as, for example, human lung total RNA (Ambion; AM7968). In some embodiments, a normal level or normal range has already been predetermined prior to testing a sample for an elevated level.

[0087] In some embodiments, the normal level of target RNA can be determined from one or more continuous cell lines, typically cell lines previously shown to have expression levels of the at least one target RNA that approximate the level of expression in normal human lung cells.

[0088] In some embodiments, a method comprises detecting the level of expression of at least one target RNA. In some embodiments, a method further comprises comparing the level of expression of at least one target RNA to a normal level of expression of the at least one target RNA. In some embodiments, a method further comprises comparing the level of expression of at least one target RNA to a control level of expression of the at least one target RNA. A control level of expression of the at least one target RNA is, in some embodiments, the level of expression of the at least one target RNA in a normal cell. In some such embodiments, a control level may be referred to as a normal level. In some embodiments, a greater level of expression of the at least one target RNA relative to the level of expression of the at least one target RNA in a normal cell indicates lung cancer. In some embodiments, a reduced level of expression of the at least one target RNA relative to the level of expression of the at least one target RNA in a normal cell indicates lung cancer.

[0089] In some embodiments, the level of expression of the at least one target RNA is compared to a reference level of expression, e.g., from a patient with a confirmed lung cancer. In some such embodiments, a similar level of expression of the at least one target RNA relative to the reference sample indicates lung cancer.

[0090] In some embodiments, a level of expression of at least one target RNA that is at least about two-fold greater than a normal level of expression of the respective at least one target RNA indicates the presence of lung cancer. In some embodiments, a level of expression of at least one target RNA that is at least about two-fold greater than the level of the respective at least one target RNA in a control sample comprised of normal cells indicates the presence of a lung cancer. In various embodiments, a level of expression of at least one target RNA that is at least about 3-fold, at least about 4-fold, at least about 5-fold, at least about 6-fold, at least about 7-fold, at least about 8-fold, at least about 9-fold, or at least about 10-fold greater than the level of expression of the respective at least one target RNA in a control sample comprised of normal cells indicates the presence of lung cancer. In various embodiments, a level of expression of at least one target RNA that is at least about 3-fold, at least about 4-fold, at least about 5-fold, at least about 6-fold, at least about 7-fold, at least about 8-fold, at least about 9-fold, or at least about 10-fold greater than a normal level of expression of the at least one target RNA indicates the presence of lung cancer.

[0091] In some embodiments, a level of expression of at least one target RNA that is reduced by at least about two-fold relative to a normal level of expression of the respective at least one target RNA indicates the presence of lung cancer. In some embodiments, a level of expression of at least one target RNA that is reduced by at least about two-fold as compared to the level of the respective at least one target RNA in a control sample comprised of normal cells indicates the presence of a lung cancer. In various embodiments, a level of expression of at least one target RNA that is reduced by at least about 3-fold, at least about 4-fold, at least about 5-fold, at least about 6-fold, at least about 7-fold, at least about 8-fold, at least about 9-fold, or at least about 10-fold as compared to the level of expression of the respective at least one target RNA in a control sample comprised of normal cells indicates the presence of lung cancer. In various embodiments, a level of expression of at least one target RNA that is reduced by at least about 3-fold, at least about 4-fold, at least about 5-fold, at least about 6-fold, at least about 7-fold, at least about 8-fold, at least about 9-fold, or at least about 10-fold as compared to a normal level of expression of the at least one target RNA indicates the presence of lung cancer.

[0092] In some embodiments, a control level of expression of a target RNA is determined contemporaneously, such as in the same assay or batch of assays, as the level of expression of the target RNA in a sample. In some embodiments, a control level of expression of a target RNA is not determined contemporaneously as the level of expression of the target RNA in a sample. In some such embodiments, the control level of expression has been determined previously.

[0093] In some embodiments, the level of expression of a target RNA is not compared to a control level of expression, for example, when it is known that the target RNA is expressed at very low levels, or not at all, in normal cells. In some such embodiments, detection of a high level of the target RNA in a sample is indicative of lung cancer. Alternatively, if the target RNA is known to be expressed at high levels in normal cells, then detection of a very low level of the target RNA in a sample is indicative of lung cancer.

[0094] 4.1.3. Exemplary Methods of Preparing RNAs

[0095] Target RNA can be prepared by any appropriate method. Total RNA can be isolated by any method, including, but not limited to, the protocols set forth in Wilkinson, M. (1988) Nucl. Acids Res. 16(22):10, 933; and Wilkinson, M. (1988) Nucl. Acids Res. 16(22): 10934, or by using commercially-available kits or reagents, such as the TRIzol® reagent (Invitrogen™), Total RNA Extraction Kit (iNtRON Biotechnology), Total RNA Purification Kit (Norgen Biotek Corp.), RNAqueous™ (Ambion), MagMAX™ (Ambion), RecoverAll™ (Ambion), RNeasy (Qiagen), etc.

[0096] In some embodiments, small RNAs are isolated or enriched. In some embodiments “small RNA” refers to RNA molecules smaller than about 200 nucleotides (nt) in length. In some embodiments, “small RNA” refers to RNA molecules smaller than about 100 nt, smaller than about 90 nt, smaller than about 80 nt, smaller than about 70 nt, smaller than about 60 nt, smaller than about 50 nt, or smaller than about 40 nt.

[0097] Enrichment of small RNAs can be accomplished by method. Such methods include, but are not limited to, methods involving organic extraction followed by adsorption of nucleic acid molecules on a glass fiber filter using specialized binding and wash solutions, and methods using spin column purification. Enrichment of small RNAs may be accomplished using commercially-available kits, such as mirVana™ Isolation Kit (Applied Biosystems), mirPremier™ microRNA Isolation Kit (Sigma-Aldrich), PureLink™ miRNA Isolation Kit (Invitrogen), miRCURY™ RNA isolation kit (Exiqon), microRNA Purification Kit (Norgen Biotek Corp.), miRNeasy kit (Qiagen), etc. In some embodiments, purification can be accomplished by the TRIzol® (Invitrogen) method, which employs a phenol/isothiocyanate solution to which chloroform is added to separate the RNA-containing aqueous phase. Small RNAs are subsequently recovered from the aqueous by precipitation with isopropyl alcohol. In some embodiments, small RNAs can be purified using chromatographic methods, such as gel electrophoresis using the flashPAGE™ Fractionator available from Applied Biosystems.

[0098] In some embodiments, small RNA is isolated from other RNA molecules to enrich for target RNAs, such that the small RNA fraction (e.g., containing RNA molecules that are 200 nucleotides or less in length, such as less than 100 nucleotides in length, such as less than 50 nucleotides in length, such as from about 10 to about 40 nucleotides in length) is substantially pure, meaning it is at least about 80%, 85%, 90%, 95% pure or more, but less than 100% pure, with respect to larger RNA molecules. Alternatively, enrichment of small RNA can be expressed in terms of fold-enrichment. In some embodiments, small RNA is enriched by about, at least about, or at most about 5×, 10×, 20×, 30×, 40×, 50×, 60×, 70×, 80×, 90×, 100×, 110×, 120×, 130×, 140×, 150×, 160×, 170×, 180×, 190×, 200×, 210×, 220×, 230×, 240×, 250×, 260×, 270×, 280×, 290×, 300×, 310×, 320×, 330×, 340×, 350×, 360×, 370×, 380×, 390×, 400×, 410×, 420×, 430×, 440×, 450×, 460×, 470×, 480×, 490×, 500×, 600×, 700×, 800×, 900×, 1000×, 1100×, 1200×, 1300×, 1400×, 1500×, 1600×, 1700×, 1800×, 1900×, 2000×, 3000×, 4000×, 5000×, 6000×, 7000×, 8000×, 9000×, 10,000× or more, or any range derivable therein, with respect to the concentration of larger RNAs in an RNA isolate or total RNA in a sample.

[0099] In yet other embodiments, expression is measured in a sample in which RNA has not first been purified from the cells.

[0100] In some embodiments, RNA is modified before target RNAs are detected. In some embodiments, the modified RNA is total RNA. In other embodiments, the modified RNA is small RNA that has been purified from total RNA or from cell lysates, such as RNA less than 200 nucleotides in length, such as less than 100 nucleotides in length, such as less than 50 nucleotides in length, such as from about 10 to about 40 nucleotides in length. RNA modifications that can be utilized in the methods described herein include, but are not limited to, the addition of a poly-dA or a poly-dT tail, which can be accomplished chemically or enzymatically, and/or the addition of a small molecule, such as biotin.

[0101] In some embodiments, one or more target RNAs are reverse transcribed. In some embodiments, where present, RNA is modified when it is reverse transcribed, such as when a poly-dA or a poly-dT tail is added to the cDNA during reverse transcription. In other embodiments, RNA is modified before it is reverse transcribed. In some embodiments, total RNA is reverse transcribed. In other embodiments, small RNAs are isolated or enriched before the RNA is reverse transcribed.

[0102] When a target RNA is reverse transcribed, a complement of the target RNA is formed. In some embodiments, the complement of the target RNA is detected rather than the target RNA itself (or a DNA copy thereof). Thus, when the methods discussed herein indicate that a target RNA is detected, or the level of a target RNA is determined, such detection or determination may be carried out on a complement of the target RNA instead of, or in addition to, the target RNA itself. In some embodiments, when the complement of the target RNA is detected rather than the target RNA, a probe is used that is complementary to the complement of the target RNA. In such embodiments, the probe comprises at least a portion that is identical in sequence to the target RNA, although it may contain thymidine in place of uridine, and/or comprise other modified nucleotides.

[0103] In some embodiments, the method of detecting one or more target RNAs comprises amplifying cDNA complementary to said target RNA. Such amplification can be accomplished by any method. Exemplary methods include, but are not limited to, real time PCR, endpoint PCR, and amplification using T7 polymerase from a T7 promoter annealed to a cDNA, such as provided by the SenseAmp Plus™ Kit available at Implen, Germany.

[0104] When a target RNA or a cDNA complementary to a target RNA is amplified, in some embodiments, a DNA amplicon of a target RNA is formed. A DNA amplicon may be single stranded or double-stranded. In some embodiments, when a DNA amplicon is single-stranded, the sequence of the DNA amplicon is related to the target RNA in either the sense or antisense orientation. In some embodiments, the DNA amplicon of the target RNA is detected rather than the target RNA itself. Thus, when the methods discussed herein indicate that a target RNA is detected, or the level of a target RNA is determined, such detection or determination may be carried out on a DNA amplicon of the target RNA instead of, or in addition to, the target RNA itself. In some embodiments, when the DNA amplicon of the target RNA is detected rather than the target RNA, a probe is used that is complementary to the complement of the target RNA. In some embodiments, when the DNA amplicon of the target RNA is detected rather than the target RNA, a probe is used that is complementary to the target RNA. Further, in some embodiments, multiple probes may be used, and some probes may be complementary to the target RNA and some probes may be complementary to the complement of the target RNA.

[0105] In some embodiments, the method of detecting one or more target RNAs comprises RT-PCR, as described below. In some embodiments, detecting one or more target RNAs comprises real-time monitoring of an RT-PCR reaction, which can be accomplished by any method. Such methods include, but are not limited to, the use of TaqMan®, Molecular beacon, or Scorpion probes (i.e., FRET probes) and the use of intercalating dyes, such as SYBR green, EvaGreen, thiazole orange, YO-PRO, TO-PRO, etc.

[0106] 4.1.4. Exemplary Analytical Methods

[0107] As described above, methods are presented for detecting lung cancer in a sample from a patient. In some embodiments, the method comprises detecting a level of expression of at least one target RNA capable of specifically hybridizing to a nucleic acid comprising a sequence selected from SEQ ID NOs: 1 to 397, 1063 to 1210, 2064 to 2183, 2673 to 2680, and 2689 that is greater in the sample than a normal level of expression of the at least one target RNA in a control sample, such as a sample derived from normal lung cells. In some embodiments, a method comprises detecting a level of one or more target RNAs that comprise a sequence that is complementary to at least 15 contiguous nucleotides of a sequence selected from SEQ ID NOs: 1 to 397, 1063 to 1210, 2064 to 2183, 2673 to 2680, and 2689 that is greater in the sample than a normal level of expression of the at least one target RNA in a control sample. In some embodiments, a method comprises detecting a level of one or more target RNAs that comprise at least 15 contiguous nucleotides of a sequence selected from SEQ ID NOs: 794 to 1043, 2576 to 2672, and 2692 that is greater in the sample than a normal level of expression of the at least one target RNA in a control sample.

[0108] In some embodiments, the method comprises detecting a level of expression of at least one target RNA capable of specifically hybridizing to a nucleic acid comprising a sequence selected from SEQ ID NOs: 1 to 397, 1363 to 1707, and 2312 to 2452 that is reduced in the sample relative to a normal level of expression of the at least one target RNA in a control sample, such as a sample derived from normal lung cells. In some embodiments, a method comprises detecting a level of one or more target RNAs that comprise a sequence that is complementary to at least 15 contiguous nucleotides of a sequence selected from SEQ ID NOs: 1 to 397, 1363 to 1707, and 2312 to 2452 that is reduced in the sample relative to a normal level of expression of the at least one target RNA in a control sample. In some embodiments, a method comprises detecting a level of one or more target RNAs that comprise at least 15 contiguous nucleotides of a sequence selected from SEQ ID NOs: 794 to 1043, 2576 to 2672, and 2692 that is reduced in the sample relative a normal level of expression of the at least one target RNA in a control sample.

[0109] In some embodiments, a target RNA, in its mature form, comprises fewer than 30 nucleotides. In some embodiments, a target RNA is a microRNA.

[0110] In some embodiments, such as those described above, the method further comprises detecting a level of expression of at least one target RNA of the human miRNome that does not specifically hybridize to a nucleic acid comprising a sequence selected from SEQ ID NOs: 1 to 397, 1063 to 1210, 1363 to 1707, 2064 to 2183, 2312 to 2452, 2673 to 2680, and 2689 and does not comprise at least 15 contiguous nucleotides of a sequence selected from SEQ ID NOs: 794 to 1043, 2576 to 2672, and 2692, that is altered in the sample relative to a normal level of expression of the at least one target RNA in a control sample. As used herein, the term “human miRNome” refers to all microRNA genes in a human cell and the mature microRNAs produced therefrom.

[0111] Any analytical procedure capable of permitting specific and quantifiable (or semi-quantifiable) detection of the desired at least one target RNA may be used in the methods herein presented. Such analytical procedures include, but are not limited to, the microarray methods set forth in Examples 1, 2, 4, and 5, the microbead methods set forth in Example 3, and methods known to those skilled in the art.

[0112] In some embodiments, detection of a target RNA comprises forming a complex comprising a polynucleotide that is complementary to a target RNA or to a complement thereof, and a nucleic acid selected from the target RNA, a DNA amplicon of the target RNA, and a complement of the target RNA. Thus, in some embodiments, the polynucleotide forms a complex with a target RNA. In some embodiments, the polynucleotide forms a complex with a complement of the target RNA, such as a cDNA that has been reverse transcribed from the target RNA. In some embodiments, the polynucleotide forms a complex with a DNA amplicon of the target RNA. When a double-stranded DNA amplicon is part of a complex, as used herein, the complex may comprise one or both strands of the DNA amplicon. Thus, in some embodiments, a complex comprises only one strand of the DNA amplicon. In some embodiments, a complex is a triplex and comprises the polynucleotide and both strands of the DNA amplicon. In some embodiments, the complex is formed by hybridization between the polynucleotide and the target RNA, complement of the target RNA, or DNA amplicon of the target RNA. The polynucleotide, in some embodiments, is a primer or probe.

[0113] In some embodiments, a method comprises detecting the complex. In some embodiments, the complex does not have to be associated at the time of detection. That is, in some embodiments, a complex is formed, the complex is then dissociated or destroyed in some manner, and components from the complex are detected. An example of such a system is a TaqMan® assay. In some embodiments, when the polynucleotide is a primer, detection of the complex may comprise amplification of the target RNA, a complement of the target RNA, or a DNA amplicon of a target RNA.

[0114] In some embodiments the analytical method used for detecting at least one target RNA in the methods set forth herein includes real-time quantitative RT-PCR. See Chen, C. et al. (2005) Nucl. Acids Res. 33:e179 and PCT Publication No. WO 2007/117256, which are incorporated herein by reference in its entirety. In some embodiments, the analytical method used for detecting at least one target RNA includes the method described in U.S. Publication No. US2009/0123912 A1, which is incorporated herein by reference in its entirety. In an exemplary method described in that publication, an extension primer comprising a first portion and second portion, wherein the first portion selectively hybridizes to the 3′ end of a particular microRNA and the second portion comprises a sequence for universal primer, is used to reverse transcribe the microRNA to make a cDNA. A reverse primer that selectively hybridizes to the 5′ end of the microRNA and a universal primer are then used to amplify the cDNA in a quantitative PCR reaction.

[0115] In some embodiments, the analytical method used for detecting at least one target RNA includes the use of a TaqMan® probe. In some embodiments, the analytical method used for detecting at least one target RNA includes a TaqMan® assay, such as the TaqMan® MicroRNA Assays sold by Applied Biosystems, Inc. In an exemplary TaqMan® assay, total RNA is isolated from the sample. In some embodiments, the assay can be used to analyze about 10 ng of total RNA input sample, such as about 9 ng of input sample, such as about 8 ng of input sample, such as about 7 ng of input sample, such as about 6 ng of input sample, such as about 5 ng of input sample, such as about 4 ng of input sample, such as about 3 ng of input sample, such as about 2 ng of input sample, and even as little as about 1 ng of input sample containing microRNAs.

[0116] The TaqMan® assay utilizes a stem-loop primer that is specifically complementary to the 3′-end of a target RNA. In an exemplary TaqMan® assay, hybridizing the stem-loop primer to the target RNA is followed by reverse transcription of the target RNA template, resulting in extension of the 3′ end of the primer. The result of the reverse transcription is a chimeric (DNA) amplicon with the step-loop primer sequence at the 5′ end of the amplicon and the cDNA of the target RNA at the 3′ end. Quantitation of the target RNA is achieved by real time RT-PCR using a universal reverse primer having a sequence that is complementary to a sequence at the 5′ end of all stem-loop target RNA primers, a target RNA-specific forward primer, and a target RNA sequence-specific TaqMan® probe.

[0117] The assay uses fluorescence resonance energy transfer (“FRET”) to detect and quantitate the synthesized PCR product. Typically, the TaqMan® probe comprises a fluorescent dye molecule coupled to the 5′-end and a quencher molecule coupled to the 3′-end, such that the dye and the quencher are in close proximity, allowing the quencher to suppress the fluorescence signal of the dye via FRET. When the polymerase replicates the chimeric amplicon template to which the TaqMan® probe is bound, the 5′-nuclease of the polymerase cleaves the probe, decoupling the dye and the quencher so that FRET is abolished and a fluorescence signal is generated. Fluorescence increases with each RT-PCR cycle proportionally to the amount of probe that is cleaved.

[0118] Additional exemplary methods for RNA detection and/or quantification are described, e.g., in U.S. Publication No. US 2007/0077570 (Lao et al.), PCT Publication No. WO 2007/025281 (Tan et al.), U.S. Publication No. US2007/0054287 (Bloch), PCT Publication No. WO2006/0130761 (Bloch), and PCT Publication No. WO 2007/011903 (Lao et al.), which are incorporated by reference herein in their entireties for any purpose.

[0119] In some embodiments, quantitation of the results of real-time RT-PCR assays is done by constructing a standard curve from a nucleic acid of known concentration and then extrapolating quantitative information for target RNAs of unknown concentration. In some embodiments, the nucleic acid used for generating a standard curve is an RNA (e.g., microRNA) of known concentration. In some embodiments, the nucleic acid used for generating a standard curve is a purified double-stranded plasmid DNA or a single-stranded DNA generated in vitro.

[0120] In some embodiments, where the amplification efficiencies of the target nucleic acids and the endogenous reference are approximately equal, quantitation is accomplished by the comparative Ct (cycle threshold, e.g., the number of PCR cycles required for the fluorescence signal to rise above background) method. Ct values are inversely proportional to the amount of nucleic acid target in a sample. In some embodiments, Ct values of the target RNA of interest can be compared with a control or calibrator, such as RNA (e.g., microRNA) from normal tissue. In some embodiments, the Ct values of the calibrator and the target RNA samples of interest are normalized to an appropriate endogenous housekeeping gene.

[0121] In addition to the TaqMan® assays, other real-time RT-PCR chemistries useful for detecting and quantitating PCR products in the methods presented herein include, but are not limited to, Molecular Beacons, Scorpion probes and intercalating dyes, such as SYBR Green, EvaGreen, thiazole orange, YO-PRO, TO-PRO, etc., which are discussed below.

[0122] In some embodiments, real-time RT-PCR detection is performed specifically to detect and quantify the expression of a single target RNA. The target RNA, in some embodiments, is selected from a target RNA capable of specifically hybridizing to a nucleic acid comprising a sequence selected from SEQ ID NOs: 1 to 397, 1063 to 1210, 1363 to 1707, 2064 to 2183, 2312 to 2452, 2673 to 2680, and 2689. In some embodiments, the target RNA comprises a sequence that is complementary to at least 15 contiguous nucleotides of a sequence selected from SEQ ID NOs: 1 to 397, 1063 to 1210, 1363 to 1707, 2064 to 2183, 2312 to 2452, 2673 to 2680, and 2689. The target RNA, in some embodiments, comprises at least 15 contiguous nucleotides of a sequence selected from SEQ ID NOs.: 794 to 1043, 2576 to 2672, and 2692. In some embodiments, the target RNA specifically hybridizes to a nucleic acid comprising a sequence selected from the probe sequences in Table 6. In some embodiments, the target RNA specifically hybridizes to a nucleic acid comprising a sequence selected from the probe sequences in Table 7. In some embodiments, the target RNA specifically hybridizes to a nucleic acid comprising a sequence selected from the probe sequences in Table 8. In some embodiments, the target RNA specifically hybridizes to a nucleic acid comprising a sequence selected from the probe sequences in Table 9. In some embodiments, the target RNA specifically hybridizes to a nucleic acid comprising a sequence selected from the probe sequences in Tables 32 and 33. In some embodiments, the target RNA specifically hybridizes to a nucleic acid comprising a sequence selected from the probe sequences in Table 34.

[0123] In some embodiments, a target RNA, in its mature form, comprises fewer than 30 nucleotides. In some embodiments, a target RNA is a microRNA.

[0124] In various embodiments, real-time RT-PCR detection is utilized to detect, in a single multiplex reaction, at least 2, at least 3, at least 4, at least 5, at least 6, at least 7, or at least 8 target RNAs. At least one target RNA, in some embodiments, is capable of specifically hybridizing to a nucleic acid comprising a sequence selected from SEQ ID NOs: 1 to 397, 1063 to 1210, 1363 to 1707, 2064 to 2183, 2312 to 2452, 2673 to 2680, and 2689. In some embodiments, at least one target RNA comprises at least 15 contiguous nucleotides of a sequence selected from SEQ ID NOs: 794 to 1043, 2576 to 2672, and 2692. In some embodiments, at least one target RNA comprises a sequence that is complementary to at least 15 contiguous nucleotides of a sequence selected from SEQ ID NOs: 1 to 397, 1063 to 1210, 1363 to 1707, 2064 to 2183, 2312 to 2452, 2673 to 2680, and 2689. In some embodiments, a target RNA, in its mature form, comprises fewer than 30 nucleotides. In some embodiments, a target RNA is a microRNA.

[0125] In some embodiments, the method comprises detecting expression in a multiplex RT-PCR reaction of at least 2, at least 3, at least 5, at least 10, or at least 15 target RNAs, wherein each target RNA is capable of specifically hybridizing to a probe sequence in Table 6. In some embodiments, the method comprises detecting expression, using a single multiplex RT-PCR reaction, of at least 2, at least 3, at least 4, at least 5, at least 6, at least 7, at least 8, at least 9, at least 10, at least 12, at least 15, at least 20, or at least 25 target RNAs, wherein each target RNA is capable of specifically hybridizing to a probe sequence in Table 7. In some embodiments, the method comprises detecting expression, using a single multiplex RT-PCR reaction, of at least 2, at least 3, at least 4, at least 5, at least 6, or at least 7 target RNAs, wherein each target RNA is capable of specifically hybridizing to a probe sequence in Table 8. In some embodiments, the method comprises detecting expression in a multiplex RT-PCR reaction of at least 2, at least 3, at least 5, at least 10, at least 15, at least 20, at least 25, at least 30, at least 40, or at least 50 target RNAs, wherein each target RNA is capable of specifically hybridizing to a probe sequence in Table 9. In some embodiments, the method comprises detecting expression in a multiplex RT-PCR reaction of at least two, at least five, at least 10, at least 15, at least 20, at least 25, at least 30, or at least target RNAs, wherein each target RNA is capable of specifically hybridizing to a probe sequence in one of Tables 32 or 33. In some embodiments, the method comprises detecting expression in a multiplex RT-PCR reaction of at least two, at least five, at least 10, at least 15, at least 20, at least 30, at least 40, at least 50, or at least 60 target RNAs, wherein each target RNA is capable of specifically hybridizing to a probe sequence in Table 34.

[0126] In some multiplex embodiments, a plurality of probes, such as TaqMan® probes, each specific for a different RNA target, is used. In some embodiments, each target RNA-specific probe is spectrally distinguishable from the other probes used in the same multiplex reaction.

[0127] In some embodiments, quantitation of real-time RT PCR products is accomplished using a dye that binds to double-stranded DNA products, such as SYBR Green, EvaGreen, thiazole orange, YO-PRO, TO-PRO, etc. In some embodiments, the assay is the QuantiTect SYBR Green PCR assay from Qiagen. In this assay, total RNA is first isolated from a sample. Total RNA is subsequently poly-adenylated at the 3′-end and reverse transcribed using a universal primer with poly-dT at the 5′-end. In some embodiments, a single reverse transcription reaction is sufficient to assay multiple target RNAs. Real-time RT-PCR is then accomplished using target RNA-specific primers and an miScript Universal Primer, which comprises a poly-dT sequence at the 5′-end. SYBR Green dye binds non-specifically to double-stranded DNA and upon excitation, emits light. In some embodiments, buffer conditions that promote highly-specific annealing of primers to the PCR template (e.g., available in the QuantiTect SYBR Green PCR Kit from Qiagen) can be used to avoid the formation of non-specific DNA duplexes and primer dimers that will bind SYBR Green and negatively affect quantitation. Thus, as PCR product accumulates, the signal from SYBR Green increases, allowing quantitation of specific products.

[0128] Real-time RT-PCR is performed using any RT-PCR instrumentation available in the art. Typically, instrumentation used in real-time RT-PCR data collection and analysis comprises a thermal cycler, optics for fluorescence excitation and emission collection, and optionally a computer and data acquisition and analysis software.

[0129] In some embodiments, the analytical method used in the methods described herein is a DASL® (cDNA-mediated Annealing, Selection, Extension, and Ligation) Assay, such as the MicroRNA Expression Profiling Assay available from Illumina, Inc. (See http://www.illumina.com/downloads/MicroRNAAssayWorkflow.pdf). In some embodiments, total RNA is isolated from a sample to be analyzed by any method. Additionally, in some embodiments, small RNAs are isolated from a sample to be analyzed by any method. Total RNA or isolated small RNAs may then be polyadenylated (>18 A residues are added to the 3′-ends of the RNAs in the reaction mixture). The RNA is reverse transcribed using a biotin-labeled DNA primer that comprises from the 5′ to the 3′ end, a sequence that includes a PCR primer site and a poly-dT region that binds to the poly-dA tail of the sample RNA. The resulting biotinylated cDNA transcripts are then hybridized to a solid support via a biotin-streptavidin interaction and contacted with one or more target RNA-specific polynucleotides. The target RNA-specific polynucleotides comprise, from the 5′-end to the 3′-end, a region comprising a PCR primer site, region comprising an address sequence, and a target RNA-specific sequence.

[0130] In some DASL® embodiments, the target RNA-specific sequence comprises at least 8, at least 9, at least 10, at least 11, at least 12, at least 13, at least 14, at least 15, at least 16, at least 17, at least 18, at least 19, at least 20, at least 21, at least 22, at least 23, or at least 24 contiguous nucleotides having a sequence identically present in, or complementary to a region of, one of SEQ ID NOs: 1 to 397, 1063 to 1210, 1363 to 1707, 2064 to 2183, 2312 to 2452, 2673 to 2680, and 2689. In some embodiments, the target RNA-specific sequence comprises a probe sequence that is complementary to at least a portion of a microRNA of the human miRNome.

[0131] After hybridization, the target RNA-specific polynucleotide is extended, and the extended products are then eluted from the immobilized cDNA array. A second PCR reaction using a fluorescently-labeled universal primer generates a fluorescently-labeled DNA comprising the target RNA-specific sequence. The labeled PCR products are then hybridized to a microbead array for detection and quantitation.

[0132] In some embodiments, the analytical method used for detecting and quantifying the expression of the at least one target RNA in the methods described herein is a bead-based flow cytometric assay. See Lu J. et al. (2005) Nature 435:834-838, which is incorporated herein by reference in its entirety. An example of a bead-based flow cytometric assay is the xMAP® technology of Luminex, Inc. (See http://www.luminexcorp.com/technology/index.html). In some embodiments, total RNA is isolated from a sample and is then labeled with biotin. The labeled RNA is then hybridized to target RNA-specific capture probes (e.g., FlexmiR™ products sold by Luminex, Inc. at http://www.luminexcorp.com/products/assays/index.html) that are covalently bound to microbeads, each of which is labeled with 2 dyes having different fluorescence intensities. A streptavidin-bound reporter molecule (e.g., streptavidin-phycoerythrin, also known as “SAPE”) is attached to the captured target RNA and the unique signal of each bead is read using flow cytometry. In some embodiments, the RNA sample (total RNA or enriched small RNAs) is first polyadenylated, and is subsequently labeled with a biotinylated 3DNA™ dendrimer (i.e., a multiple-arm DNA with numerous biotin molecules bound thereto), such as those sold by Marligen Biosciences as the Vantage™ microRNA Labeling Kit, using a bridging polynucleotide that is complementary to the 3′-end of the poly-dA tail of the sample RNA and to the 5′-end of the polynucleotide attached to the biotinylated dendrimer. The streptavidin-bound reporter molecule is then attached to the biotinylated dendrimer before analysis by flow cytometry. See http://www.marligen.com/vantage-microrna-labeling-kit.html. In some embodiments, biotin-labeled RNA is first exposed to SAPE, and the RNA/SAPE complex is subsequently exposed to an anti-phycoerythrin antibody attached to a DNA dendrimer, which can be bound to as many as 900 biotin molecules. This allows multiple SAPE molecules to bind to the biotinylated dendrimer through the biotin-streptavidin interaction, thus increasing the signal from the assay.

[0133] In some embodiments, the analytical method used for detecting and quantifying the expression of the at least one target RNA in the methods described herein is by gel electrophoresis and detection with labeled probes (e.g., probes labeled with a radioactive or chemiluminescent label), such as by Northern blotting. In some embodiments, total RNA is isolated from the sample, and then is size-separated by SDS polyacrylamide gel electrophoresis. The separated RNA is then blotted onto a membrane and hybridized to radiolabeled complementary probes. In some embodiments, exemplary probes contain one or more affinity-enhancing nucleotide analogs as discussed below, such as locked nucleic acid (“LNA”) analogs, which contain a bicyclic sugar moiety instead of deoxyribose or ribose sugars. See, e.g., Varallyay, E. et al. (2008) Nature Protocols 3(2):190-196, which is incorporated herein by reference in its entirety. In some embodiments, the total RNA sample can be further purified to enrich for small RNAs. In some embodiments, target RNAs can be amplified by, e.g., rolling circle amplification using a long probe that is complementary to both ends of a target RNA (“padlocked probes”), ligation to circularize the probe followed by rolling circle replication using the target RNA hybridized to the circularized probe as a primer. See, e.g., Jonstrup, S. P. et al. (2006) RNA 12:1-6, which is incorporated herein by reference in its entirety. The amplified product can then be detected and quantified using, e.g., gel electrophoresis and Northern blotting.

[0134] In alternative embodiments, labeled probes are hybridized to isolated total RNA in solution, after which the RNA is subjected to rapid ribonuclease digestion of single-stranded RNA, e.g., unhybridized portions of the probes or unhybridized target RNAs. In these embodiments, the ribonuclease treated sample is then analyzed by SDS-PAGE and detection of the radiolabeled probes by, e.g., Northern blotting. See mirVana™ miRNA Detection Kit sold by Applied Biosystems, Inc. product literature at http://www.ambion.com/catalog/CatNum.php?1552.

[0135] In some embodiments, the analytical method used for detecting and quantifying the at least one target RNA in the methods described herein is by hybridization to a microarray. See, e.g., Liu, C. G. et al. (2004) Proc. Nat'l Acad. Sci. USA 101:9740-9744; Lim, L. P. et al. (2005) Nature 433:769-773, each of which is incorporated herein by reference in its entirety, and Examples 1, 2, 4, and 5.

[0136] In some embodiments, detection and quantification of a target RNA using a microarray is accomplished by surface plasmon resonance. See, e.g., Nanotech News (2006), available at http://nano.cancer.gov/news_center/nanotech_news_{—}2006-10-30b.asp. In these embodiments, total RNA is isolated from a sample being tested. Optionally, the RNA sample is further purified to enrich the population of small RNAs. After purification, the RNA sample is bound to an addressable microarray containing probes at defined locations on the microarray. Nonlimiting exemplary probes include probes comprising sequences set forth in SEQ ID NOs: 1 to 397, 1063 to 1210, 1363 to 1707, 2064 to 2183, 2312 to 2452, 2673 to 2680, and 2689. Exemplary probes also include, but are not limited to, probes comprising a region that is complementary to at least 15 contiguous nucleotides of a sequence selected from SEQ ID NOs: 794 to 1043, 2576 to 2672, and 2692. Exemplary probes also include, but are not limited to, probes comprising at least 15 contiguous nucleotides of a sequence selected from SEQ ID NOs: 1 to 397, 1063 to 1210, 1363 to 1707, 2064 to 2183, 2312 to 2452, 2673 to 2680, and 2689. In some embodiments, the probes contain one or more affinity-enhancing nucleotide analogs as discussed below, such as locked nucleic acid (“LNA”) nucleotide analogs. After hybridization to the microarray, the RNA that is hybridized to the array is first polyadenylated, and the array is then exposed to gold particles having poly-dT bound to them. The amount of bound target RNA is quantitated using surface plasmon resonance.

[0137] In some embodiments, microarrays are utilized in a RNA-primed, Array-based Klenow Enzyme (“RAKE”) assay. See Nelson, P. T. et al. (2004) Nature Methods 1(2):1-7; Nelson, P. T. et al. (2006) RNA 12(2):1-5, each of which is incorporated herein by reference in its entirety. In some embodiments, total RNA is isolated from a sample. In some embodiments, small RNAs are isolated from a sample. The RNA sample is then hybridized to DNA probes immobilized at the 5′-end on an addressable array. The DNA probes comprise, in some embodiments, from the 5′-end to the 3′-end, a first region comprising a “spacer” sequence which is the same for all probes, a second region comprising three thymidine-containing nucleosides, and a third region comprising a sequence that is complementary to a target RNA of interest.

[0138] Exemplary target RNAs of interest include, but are not limited to, target RNAs capable of specifically hybridizing to a nucleic acid comprising a sequence selected from SEQ ID NOs: 1 to 397, 1063 to 1210, 1363 to 1707, 2064 to 2183, 2312 to 2452, 2673 to 2680, and 2689; target RNAs comprising a region that is identical to at least 15 contiguous nucleotides of a sequence selected from SEQ ID NOs: 794 to 1043, 2576 to 2672, and 2692; and target RNAs comprising a region that is complementary to at least 15 contiguous nucleotides of a sequence selected from SEQ ID NOs: 1 to 397, 1063 to 1210, 1363 to 1707, 2064 to 2183, 2312 to 2452, 2673 to 2680, and 2689. Target RNAs also include target RNAs in the miRNome that do not specifically hybridize to a nucleic acid comprising a sequence selected from SEQ ID NOs: 1 to 397, 1063 to 1210, 1363 to 1707, 2064 to 2183, 2312 to 2452, 2673 to 2680, and 2689. In some embodiments, a target RNA, in its mature form, comprises fewer than 30 nucleotides. In some embodiments, a target RNA is a microRNA.

[0139] After the sample is hybridized to the array, it is exposed to exonuclease Ito digest any unhybridized probes. The Klenow fragment of DNA polymerase I is then applied along with biotinylated dATP, allowing the hybridized target RNAs to act as primers for the enzyme with the DNA probe as template. The slide is then washed and a streptavidin-conjugated fluorophore is applied to detect and quantitate the spots on the array containing hybridized and Klenow-extended target RNAs from the sample.

[0140] In some embodiments, the RNA sample is reverse transcribed. In some embodiments, the RNA sample is reverse transcribed using a biotin/poly-dA random octamer primer. When than primer is used, the RNA template is digested and the biotin-containing cDNA is hybridized to an addressable microarray with bound probes that permit specific detection of target RNAs. In some embodiments, the microarray includes at least one probe comprising at least 8, at least 9, at least 10, at least 11, at least 12, at least 13, at least 14, at least 15, at least 16, at least 17, at least 18, at least 19, at least 20, at least 21, at least 22, at least 23, or at least 24 contiguous nucleotides identically present in, or complementary to a region of, a sequence selected from SEQ ID NOs: 1 to 397, 1063 to 1210, 1363 to 1707, 2064 to 2183, 2312 to 2452, 2673 to 2680, and 2689. After hybridization of the cDNA to the microarray, the microarray is exposed to a streptavidin-bound detectable marker, such as a fluorescent dye, and the bound cDNA is detected. See Liu C. G. et al. (2008) Methods 44:22-30, which is incorporated herein by reference in its entirety.

[0141] In some embodiments, target RNAs are detected and quantified in an ELISA-like assay using probes bound in the wells of microtiter plates. See Mora J. R. and Getts R. C. (2006) BioTechniques 41:420-424 and supplementary material in BioTechniques 41(4):1-5; U.S. Patent Publication No. 2006/0094025 to Getts et al., each of which is incorporated by reference herein in its entirety. In these embodiments, a sample of RNA that is enriched in small RNAs is either polyadenylated, or is reverse transcribed and the cDNA is polyadenylated. The RNA or cDNA is hybridized to probes immobilized in the wells of a microtiter plates, wherein each of the probes comprises a sequence that is identically present in, or complementary to a region of, one of SEQ ID NOs: 1 to 397, 1063 to 1210, 1363 to 1707, 2064 to 2183, 2312 to 2452, 2673 to 2680, and 2689, or a sequence such as one or more sequences of target RNAs (or the reverse complement thereof) of the human miRNome, depending on whether RNA or cDNA is hybridized to the array. In some embodiments, the hybridized RNAs are labeled using a capture sequence, such as a DNA dendrimer (such as those available from Genisphere, Inc., http://www.genisphere.com/about_{—}3dna.html) that is labeled with a plurality of biotin molecules or with a plurality of horseradish peroxidase molecules, and a bridging polynucleotide that contains a poly-dT sequence at the 5′-end that binds to the poly-dA tail of the captured nucleic acid, and a sequence at the 3′-end that is complementary to a region of the capture sequence. If the capture sequence is biotinylated, the microarray is then exposed to streptavidin-bound horseradish peroxidase. Hybridization of target RNAs is detected by the addition of a horseradish peroxidase substrate such as tetramethylbenzidine (TMB) and measurement of the absorbance of the solution at 450 nM.

[0142] In still other embodiments, an addressable microarray is used to detect a target RNA using quantum dots. See Liang, R. Q. et al. (2005) Nucl. Acids Res. 33(2):e17, available at http://www.pubmedcentral.nih.gov/articlerender.fcgi?artid=548377, which is incorporated herein by reference in its entirety. In some embodiments, total RNA is isolated from a sample. In some embodiments, small RNAs are isolated from the sample. The 3′-ends of the target RNAs are biotinylated using biotin-X-hydrazide. The biotinylated target RNAs are captured on a microarray comprising immobilized probes comprising sequences that are identically present in, or complementary to a region of, one or more of SEQ ID NOs: 1 to 397, 1063 to 1210, 1363 to 1707, 2064 to 2183, 2312 to 2452, 2673 to 2680, and 2689 and/or probes comprising sequences other than those that are complementary to one or more microRNAs of the human miRNome. The hybridized target RNAs are then labeled with quantum dots via a biotin-streptavidin binding. A confocal laser causes the quantum dots to fluoresce and the signal can be quantified. In alternative embodiments, small RNAs can be detected using a colorimetric assay. In these embodiments, small RNAs are labeled with streptavidin-conjugated gold followed by silver enhancement. The gold nanoparticles bound to the hybridized target RNAs catalyze the reduction of silver ions to metallic silver, which can then be detected colorimetrically with a CCD camera.

[0143] In some embodiments, detection and quantification of one or more target RNAs is accomplished using microfluidic devices and single-molecule detection. In some embodiments, target RNAs in a sample of isolated total RNA are hybridized to two probes, one which is complementary to nucleic acids at the 5′-end of the target RNA and the second which is complementary to the 3′-end of the target RNA. Each probe comprises, in some embodiments, one or more affinity-enhancing nucleotide analogs, such as LNA nucleotide analogs and each is labeled with a different fluorescent dye having different fluorescence emission spectra. The sample is then flowed through a microfluidic capillary in which multiple lasers excite the fluorescent probes, such that a unique coincident burst of photons identifies a particular target RNA, and the number of particular unique coincident bursts of photons can be counted to quantify the amount of the target RNA in the sample. See U.S. Patent Publication No. 2006/0292616 to Neely et al., which is hereby incorporated by reference in its entirety. In some alternative embodiments, a target RNA-specific probe can be labeled with 3 or more distinct labels selected from, e.g., fluorophores, electron spin labels, etc., and then hybridized to an RNA sample, such as total RNA, or a sample that is enriched in small RNAs. The target RNA/probe duplex is then passed through channels in a microfluidic device and that comprise detectors that record the unique signal of the 3 labels. In this way, individual molecules are detected by their unique signal and counted. See U.S. Pat. Nos. 7,402,422 and 7,351,538 to Fuchs et al., U.S. Genomics, Inc., each of which is incorporated herein by reference in its entirety.

[0144] Nonlimiting exemplary target RNA-specific probes include probes comprising sequences selected from of SEQ ID NOs: 1 to 397. Nonlimiting exemplary target RNA-specific probes include probes comprising sequences that are complementary to sequences selected from of SEQ ID NOs: 1 to 397. Nonlimiting exemplary target RNA-specific probes also include probes comprising at least 15 contiguous nucleotides of, or the complement of at least 15 contiguous nucleotides of, a sequence selected from SEQ ID NOs: 1 to 397, 1063 to 1210, 1363 to 1707, 2064 to 2183, 2312 to 2452, 2673 to 2680, and 2689.

[0145] Optionally, the sample RNA is modified before hybridization. The target RNA/probe duplex is then passed through channels in a microfluidic device and that comprise detectors that record the unique signal of the 3 labels. In this way, individual molecules are detected by their unique signal and counted. See U.S. Pat. Nos. 7,402,422 and 7,351,538 to Fuchs et al., U.S. Genomics, Inc., each of which is incorporated herein by reference in its entirety.

[0146] In some embodiments, the detection and quantification of one or more target RNAs is accomplished by a solution-based assay, such as a modified Invader assay. See Allawi H. T. et al. (2004) RNA 10:1153-1161, which is incorporated herein by reference in its entirety. In some embodiments, the modified invader assay can be performed on unfractionated detergent lysates of cells. In other embodiments, the modified invader assay can be performed on total RNA isolated from cells or on a sample enriched in small RNAs. The target RNAs in a sample are annealed to two probes which form hairpin structures. A first probe has a hairpin structure at the 5′ end and a region at the 3′-end that has a sequence that is complementary to the sequence of a region at the 5′-end of a target RNA. The 3′-end of the first probe is the “invasive polynucleotide”. A second probe has, from the 5′ end to the 3′-end a first “flap” region that is not complementary to the target RNA, a second region that has a sequence that is complementary to the 3′-end of the target RNA, and a third region that forms a hairpin structure. When the two probes are bound to a target RNA target, they create an overlapping configuration of the probes on the target RNA template, which is recognized by the Cleavase enzyme, which releases the flap of the second probe into solution. The flap region then binds to a complementary region at the 3′-end of a secondary reaction template (“SRT”). A FRET polynucleotide (having a fluorescent dye bound to the 5′-end and a quencher that quenches the dye bound closer to the 3′ end) binds to a complementary region at the 5′-end of the SRT, with the result that an overlapping configuration of the 3′-end of the flap and the 5′-end of the FRET polynucleotide is created. Cleavase recognizes the overlapping configuration and cleaves the 5′-end of the FRET polynucleotide, generates a fluorescent signal when the dye is released into solution.

[0147] 4.1.5. Exemplary Polynucleotides

[0148] In some embodiments, polynucleotides are provided. In some embodiments, synthetic polynucleotides are provided. Synthetic polynucleotides, as used herein, refer to polynucleotides that have been synthesized in vitro either chemically or enzymatically. Chemical synthesis of polynucleotides includes, but is not limited to, synthesis using polynucleotide synthesizers, such as OligoPilot (GE Healthcare), ABI 3900 DNA Synthesizer (Applied Biosystems), and the like. Enzymatic synthesis includes, but is not limited, to producing polynucleotides by enzymatic amplification, e.g., PCR.

[0149] In some embodiments, a polynucleotide is provided that comprises at least 8, at least 9, at least 10, at least 11, at least 12, at least 13, at least 14, or at least 15 contiguous nucleotides of a sequence selected from SEQ ID NOs: 1 to 397, 1063 to 1210, 1363 to 1707, 2064 to 2183, 2312 to 2452, 2673 to 2680, and 2689 and sequences complementary to SEQ ID NOs: 1 to 397, 1063 to 1210, 1363 to 1707, 2064 to 2183, 2312 to 2452, 2673 to 2680, and 2689. In some embodiments, the polynucleotide further comprises a region having a sequence that is not found in, or complementary to, any of SEQ ID NOs: 1 to 397, 1063 to 1210, 1363 to 1707, 2064 to 2183, 2312 to 2452, 2673 to 2680, and 2689. In some embodiments, a polynucleotide is provided that comprises at least 8, at least 9, at least 10, at least 11, at least 12, at least 13, at least 14, or at least 15 contiguous nucleotides of a sequence selected from SEQ ID NOs: 794 to 1043, 2576 to 2672, and 2692, and sequences complementary to SEQ ID NOs: 794 to 1043, 2576 to 2672, and 2692. In some embodiments, the polynucleotide further comprises a region having a sequence that is not found in, or complementary to, any of SEQ ID NOs: 794 to 1043, 2576 to 2672, and 2692.

[0150] A “region” can comprise the full-length sequence, or the complement of the full-length sequence, of a particular sequence, such as any of SEQ ID NOs: 1 to 397, 1063 to 1210, 1363 to 1707, 2064 to 2183, 2312 to 2452, 794 to 1043, and 2576 to 2672 or it can comprise a subsequence, or the complement of a subsequence, of a particular sequence, such as any of SEQ ID NOs: 1 to 397, 1063 to 1210, 1363 to 1707, 2064 to 2183, 2312 to 2452, 794 to 1043, and 2576 to 2672. Such subsequences may comprise, in some embodiments, 8, 9, 10, 11, 12, 13, 14, 15, 16, 17, 18, 19, 20, 21, 22, 23, 24, 25, 26, 27, 28, 29, or more contiguous nucleotides from a particular SEQ ID NO or its complement.

[0151] In various embodiments, a polynucleotide comprises fewer than 500, fewer than 300, fewer than 200, fewer than 150, fewer than 100, fewer than 75, fewer than 50, fewer than 40, or fewer than 30 nucleotides. In various embodiments, a polynucleotide is between 8 and 200, between 8 and 150, between 8 and 100, between 8 and 75, between 8 and 50, between 8 and 40, or between 8 and 30 nucleotides long.

[0152] In some embodiments, the polynucleotide is a primer. In some embodiments, the primer is labeled with a detectable moiety. In some embodiments, a primer is not labeled. A primer, as used herein, is a polynucleotide that is capable of specifically hybridizing to a target RNA or to a cDNA reverse transcribed from the target RNA or to an amplicon that has been amplified from a target RNA or a cDNA (collectively referred to as “template”), and, in the presence of the template, a polymerase and suitable buffers and reagents, can be extended to form a primer extension product.

[0153] In some embodiments, the polynucleotide is a probe. In some embodiments, the probe is labeled with a detectable moiety. A detectable moiety, as used herein, includes both directly detectable moieties, such as fluorescent dyes, and indirectly detectable moieties, such as members of binding pairs. When the detectable moiety is a member of a binding pair, in some embodiments, the probe can be detectable by incubating the probe with a detectable label bound to the second member of the binding pair. In some embodiments, a probe is not labeled, such as when a probe is a capture probe, e.g., on a microarray or bead. In some embodiments, a probe is not extendable, e.g., by a polymerase. In other embodiments, a probe is extendable.

[0154] In some embodiments, the polynucleotide is a FRET probe that in some embodiments is labeled at the 5′-end with a fluorescent dye (donor) and at the 3′-end with a quencher (acceptor), a chemical group that absorbs (i.e., suppresses) fluorescence emission from the dye when the groups are in close proximity (i.e., attached to the same probe). In other embodiments, the donor and acceptor are not at the ends of the FRET probe. Thus, in some embodiments, the emission spectrum of the donor moiety should overlap considerably with the absorption spectrum of the acceptor moiety.

[0155] 4.1.5.1. Exemplary Polynucleotide Modifications

[0156] In some embodiments, the methods of detecting at least one target RNA described herein employ one or more polynucleotides that have been modified, such as polynucleotides comprising one or more affinity-enhancing nucleotide analogs. Modified polynucleotides useful in the methods described herein include primers for reverse transcription, PCR amplification primers, and probes. In some embodiments, the incorporation of affinity-enhancing nucleotides increases the binding affinity and specificity of a polynucleotide for its target nucleic acid as compared to polynucleotides that contain only deoxyribonucleotides, and allows for the use of shorter polynucleotides or for shorter regions of complementarity between the polynucleotide and the target nucleic acid.

[0157] In some embodiments, affinity-enhancing nucleotide analogs include nucleotides comprising one or more base modifications, sugar modifications and/or backbone modifications.

[0158] In some embodiments, modified bases for use in affinity-enhancing nucleotide analogs include 5-methylcytosine, isocytosine, pseudoisocytosine, 5-bromouracil, 5-propynyluracil, 6-aminopurine, 2-aminopurine, inosine, diaminopurine, 2-chloro-6-aminopurine, xanthine and hypoxanthine.

[0159] In some embodiments, affinity-enhancing nucleotide analogs include nucleotides having modified sugars such as 2′-substituted sugars, such as 2′-β-alkyl-ribose sugars, 2′-amino-deoxyribose sugars, 2′-fluoro-deoxyribose sugars, 2′-fluoro-arabinose sugars, and 2′-O-methoxyethyl-ribose (2′MOE) sugars. In some embodiments, modified sugars are arabinose sugars, or d-arabino-hexitol sugars.

[0160] In some embodiments, affinity-enhancing nucleotide analogs include backbone modifications such as the use of peptide nucleic acids (PNA; e.g., an oligomer including nucleobases linked together by an amino acid backbone). Other backbone modifications include phosphorothioate linkages, phosphodiester modified nucleic acids, combinations of phosphodiester and phosphorothioate nucleic acid, methylphosphonate, alkylphosphonates, phosphate esters, alkylphosphonothioates, phosphoramidates, carbamates, carbonates, phosphate triesters, acetamidates, carboxymethyl esters, methylphosphorothioate, phosphorodithioate, p-ethoxy, and combinations thereof.

[0161] In some embodiments, a polynucleotide includes at least one affinity-enhancing nucleotide analog that has a modified base, at least nucleotide (which may be the same nucleotide) that has a modified sugar, and/or at least one internucleotide linkage that is non-naturally occurring.

[0162] In some embodiments, an affinity-enhancing nucleotide analog contains a locked nucleic acid (“LNA”) sugar, which is a bicyclic sugar. In some embodiments, a polynucleotide for use in the methods described herein comprises one or more nucleotides having an LNA sugar. In some embodiments, a polynucleotide contains one or more regions consisting of nucleotides with LNA sugars. In other embodiments, a polynucleotide contains nucleotides with LNA sugars interspersed with deoxyribonucleotides. See, e.g., Frieden, M. et al. (2008) Curr. Pharm. Des. 14(11):1138-1142 .

[0163] 4.1.5.2. Exemplary Primers

[0164] In some embodiments, a primer is provided. In some embodiments, a primer is identical or complementary to at least 8, at least 9, at least 10, at least 11, at least 12, at least 13, at least 14, at least 15, at least 16, at least 17, at least 18, at least 19, at least 20, at least 21, at least 22, at least 23, or at least 24 contiguous nucleotides of a target RNA. In some embodiments, a primer may also comprise portions or regions that are not identical or complementary to the target RNA. In some embodiments, a region of a primer that is identical or complementary to a target RNA is contiguous, such that any region of a primer that is not identical or complementary to the target RNA does not disrupt the identical or complementary region.

[0165] In some embodiments, a primer comprises a portion that is identically present in a target RNA. In some such embodiments, a primer that comprises a region that is identically present in the target RNA is capable of selectively hybridizing to a cDNA that has been reverse transcribed from the RNA, or to an amplicon that has been produced by amplification of the target RNA or cDNA. In some embodiments, the primer is complementary to a sufficient portion of the cDNA or amplicon such that it selectively hybridizes to the cDNA or amplicon under the conditions of the particular assay being used.

[0166] As used herein, “selectively hybridize” means that a polynucleotide, such as a primer or probe, will hybridize to a particular nucleic acid in a sample with at least 5-fold greater affinity than it will hybridize to another nucleic acid present in the same sample that has a different nucleotide sequence in the hybridizing region. Exemplary hybridization conditions are discussed in Example 1. In some embodiments, a polynucleotide will hybridize to a particular nucleic acid in a sample with at least 10-fold greater affinity than it will hybridize to another nucleic acid present in the same sample that has a different nucleotide sequence in the hybridizing region.

[0167] Nonlimiting exemplary primers include primers comprising sequences that are identically present in, or complementary to a region of, sequences selected from SEQ ID NOs: 1 to 397, 1063 to 1210, 1363 to 1707, 2064 to 2183, 2312 to 2452, 2673 to 2680, and 2689. Exemplary primers also include, but are not limited to, primers comprising regions that are identical or complementary to at least 15 contiguous nucleotides of sequences selected from SEQ ID NOs: 1 to 397, 1063 to 1210, 1363 to 1707, 2064 to 2183, 2312 to 2452, 2673 to 2680, and 2689. Exemplary primers also include, but are not limited to, primers comprising regions that are identical or complementary to at least 15 contiguous nucleotides of sequences selected from SEQ ID NOs: 794 to 1043, 2576 to 2672, and 2692.

[0168] In some embodiments, a primer is used to reverse transcribe a target RNA, for example, as discussed herein. In some embodiments, a primer is used to amplify a target RNA or a cDNA reverse transcribed therefrom. Such amplification, in some embodiments, is quantitative PCR, for example, as discussed herein. In some embodiments, a primer comprises a detectable moiety.

[0169] 4.1.5.3. Exemplary Probes

[0170] In various embodiments, methods of detecting the presence of a lung cancer comprise hybridizing nucleic acids of a human sample with a probe. In some embodiments, the probe comprises a portion that is complementary to a target RNA. In some embodiments, the probe comprises a portion that is identically present in the target RNA. In some such embodiments, a probe that is complementary to a target RNA is complementary to a sufficient portion of the target RNA such that it selectively hybridizes to the target RNA under the conditions of the particular assay being used. In some embodiments, a probe that is complementary to a target RNA is complementary to at least 8, at least 9, at least 10, at least 11, at least 12, at least 13, at least 14, at least 15, at least 16, at least 17, at least 18, at least 19, at least 20, at least 21, at least 22, at least 23, or at least 24 contiguous nucleotides of the target RNA. In some embodiments, a probe that is complementary to a target RNA comprises a region that is complementary to at least 8, at least 9, at least 10, at least 11, at least 12, at least 13, at least 14, at least 15, at least 16, at least 17, at least 18, at least 19, at least 20, at least 21, at least 22, at least 23, or at least 24 contiguous nucleotides of the target RNA. That is, a probe that is complementary to a target RNA may also comprise portions or regions that are not complementary to the target RNA. In some embodiments, a region of a probe that is complementary to a target RNA is contiguous, such that any region of a probe that is not complementary to the target RNA does not disrupt the complementary region.

[0171] In some embodiments, the probe comprises a portion that is identically present in the target RNA. In some such embodiments, a probe that comprises a region that is identically present in the target RNA is capable of selectively hybridizing to a cDNA that has been reverse transcribed from the RNA, or to an amplicon that has been produced by amplification of the target RNA or cDNA. In some embodiments, the probe is complementary to a sufficient portion of the cDNA or amplicon such that it selectively hybridizes to the cDNA or amplicon under the conditions of the particular assay being used. In some embodiments, a probe that is complementary to a cDNA or amplicon is complementary to at least 8, at least 9, at least 10, at least 11, at least 12, at least 13, at least 14, at least 15, at least 16, at least 17, at least 18, at least 19, at least 20, at least 21, at least 22, at least 23, or at least 24 contiguous nucleotides of the cDNA or amplicon. In some embodiments, a probe that is complementary to a target RNA comprises a region that is complementary to at least 8, at least 9, at least 10, at least 11, at least 12, at least 13, at least 14, at least 15, at least 16, at least 17, at least 18, at least 19, at least 20, at least 21, at least 22, at least 23, or at least 24 contiguous nucleotides of the cDNA or amplicon. That is, a probe that is complementary to a cDNA or amplicon may also comprise portions or regions that are not complementary to the cDNA or amplicon. In some embodiments, a region of a probe that is complementary to a cDNA or amplicon is contiguous, such that any region of a probe that is not complementary to the cDNA or amplicon does not disrupt the complementary region.

[0172] Nonlimiting exemplary probes include probes comprising sequences set forth in SEQ ID NOs: 1 to 397. Nonlimiting exemplary probes include probes comprising sequences that are identically present in, or complementary to a region of, sequences selected from SEQ ID NOs: 1 to 397, 1063 to 1210, 1363 to 1707, 2064 to 2183, 2312 to 2452, 2673 to 2680, and 2689. Exemplary probes also include, but are not limited to, probes comprising regions that are identical or complementary to at least 15 contiguous nucleotides of sequences selected from SEQ ID NOs: 1 to 397, 1063 to 1210, 1363 to 1707, 2064 to 2183, 2312 to 2452, 2673 to 2680, and 2689.

[0173] In some embodiments, the method of detectably quantifying one or more target RNAs comprises: (a) isolating total RNA; (b) reverse transcribing a target RNA to produce a cDNA that is complementary to the target RNA; (c) amplifying the cDNA from (b); and (d) detecting the amount of a target RNA using real time RT-PCR.

[0174] As described above, in some embodiments, the real time RT-PCR detection is performed using a FRET probe, which includes, but is not limited to, a TaqMan® probe, a Molecular beacon probe and a Scorpion probe. In some embodiments, the real time RT-PCR detection and quantification is performed with a TaqMan® probe, i.e., a linear probe that typically has a fluorescent dye covalently bound at one end of the DNA and a quencher molecule covalently bound at the other end of the DNA. The FRET probe comprises a sequence that is complementary to a region of the cDNA such that, when the FRET probe is hybridized to the cDNA, the dye fluorescence is quenched, and when the probe is digested during amplification of the cDNA, the dye is released from the probe and produces a fluorescence signal. In such embodiments, the amount of target RNA in the sample is proportional to the amount of fluorescence measured during cDNA amplification.

[0175] The TaqMan® probe typically comprises a region of contiguous nucleotides having a sequence that is complementary to a region of a target RNA or its complementary cDNA that is reverse transcribed from the target RNA template (i.e., the sequence of the probe region is complementary to or identically present in the target RNA to be detected) such that the probe is specifically hybridizable to the resulting PCR amplicon. In some embodiments, the probe comprises a region of at least 6 contiguous nucleotides having a sequence that is fully complementary to or identically present in a region of a cDNA that has been reverse transcribed from a target RNA template, such as comprising a region of at least 8 contiguous nucleotides, at least 10 contiguous nucleotides, at least 12 contiguous nucleotides, at least 14 contiguous nucleotides, or at least 16 contiguous nucleotides having a sequence that is complementary to or identically present in a region of a cDNA reverse transcribed from a target RNA to be detected.

[0176] In some embodiments, the region of the cDNA that has a sequence that is complementary to the TaqMan® probe sequence is at or near the center of the cDNA molecule. In some embodiments, there are independently at least 2 nucleotides, at least 3 nucleotides, at least 4 nucleotides, at least 5 nucleotides of the cDNA at the 5′-end and at the 3′-end of the region of complementarity.

[0177] In some embodiments, Molecular Beacons can be used to detect and quantitate PCR products. Like TaqMan® probes, Molecular Beacons use FRET to detect and quantitate a PCR product via a probe having a fluorescent dye and a quencher attached at the ends of the probe. Unlike TaqMan® probes, Molecular Beacons remain intact during the PCR cycles. Molecular Beacon probes form a stem-loop structure when free in solution, thereby allowing the dye and quencher to be in close enough proximity to cause fluorescence quenching. When the Molecular Beacon hybridizes to a target, the stem-loop structure is abolished so that the dye and the quencher become separated in space and the dye fluoresces. Molecular Beacons are available, e.g., from Gene Link™ (see http://www.genelink.com/newsite/products/mbintro.asp).

[0178] In some embodiments, Scorpion probes can be used as both sequence-specific primers and for PCR product detection and quantitation. Like Molecular Beacons, Scorpion probes form a stem-loop structure when not hybridized to a target nucleic acid. However, unlike Molecular Beacons, a Scorpion probe achieves both sequence-specific priming and PCR product detection. A fluorescent dye molecule is attached to the 5′-end of the Scorpion probe, and a quencher is attached to the 3′-end. The 3′ portion of the probe is complementary to the extension product of the PCR primer, and this complementary portion is linked to the 5′-end of the probe by a non-amplifiable moiety. After the Scorpion primer is extended, the target-specific sequence of the probe binds to its complement within the extended amplicon, thus opening up the stem-loop structure and allowing the dye on the 5′-end to fluoresce and generate a signal. Scorpion probes are available from, e.g, Premier Biosoft International (see http://www.premierbiosoft.com/tech notes/Scorpion.html).

[0179] In some embodiments, labels that can be used on the FRET probes include colorimetric and fluorescent labels such as Alexa Fluor dyes, BODIPY dyes, such as BODIPY FL; Cascade Blue; Cascade Yellow; coumarin and its derivatives, such as 7-amino-4-methylcoumarin, aminocoumarin and hydroxycoumarin; cyanine dyes, such as Cy3 and Cy5; eosins and erythrosins; fluorescein and its derivatives, such as fluorescein isothiocyanate; macrocyclic chelates of lanthanide ions, such as Quantum Dye™; Marina Blue; Oregon Green; rhodamine dyes, such as rhodamine red, tetramethylrhodamine and rhodamine 6G; Texas Red; fluorescent energy transfer dyes, such as thiazole orange-ethidium heterodimer; and, TOTAB.

[0180] Specific examples of dyes include, but are not limited to, those identified above and the following: Alexa Fluor 350, Alexa Fluor 405, Alexa Fluor 430, Alexa Fluor 488, Alexa Fluor 500. Alexa Fluor 514, Alexa Fluor 532, Alexa Fluor 546, Alexa Fluor 555, Alexa Fluor 568, Alexa Fluor 594, Alexa Fluor 610, Alexa Fluor 633, Alexa Fluor 647, Alexa Fluor 660, Alexa Fluor 680, Alexa Fluor 700, and, Alexa Fluor 750; amine-reactive BODIPY dyes, such as BODIPY 493/503, BODIPY 530/550, BODIPY 558/568, BODIPY 564/570, BODIPY 576/589, BODIPY 581/591, BODIPY 630/650, BODIPY 650/655, BODIPY FL, BODIPY R6G, BODIPY TMR, and, BODIPY-TR; Cy3, Cy5,6-FAM, Fluorescein Isothiocyanate, HEX, 6-JOE, Oregon Green 488, Oregon Green 500, Oregon Green 514, Pacific Blue, REG, Rhodamine Green, Rhodamine Red, Renographin, ROX, SYPRO, TAMRA, 2′,4′,5′,7′-Tetrabromosulfonefluorescein, and TET.

[0181] Specific examples of fluorescently labeled ribonucleotides useful in the preparation of RT-PCR probes for use in some embodiments of the methods described herein are available from Molecular Probes (Invitrogen), and these include, Alexa Fluor 488-5-UTP, Fluorescein-12-UTP, BODIPY FL-14-UTP, BODIPY TMR-14-UTP, Tetramethylrhodamine-6-UTP, Alexa Fluor 546-14-UTP, Texas Red-5-UTP, and BODIPY TR-14-UTP. Other fluorescent ribonucleotides are available from Amersham Biosciences (GE Healthcare), such as Cy3-UTP and Cy5-UTP.

[0182] Examples of fluorescently labeled deoxyribonucleotides useful in the preparation of RT-PCR probes for use in the methods described herein include Dinitrophenyl (DNP)-1′-dUTP, Cascade Blue-7-dUTP, Alexa Fluor 488-5-dUTP, Fluorescein-12-dUTP, Oregon Green 488-5-dUTP, BODIPY FL-14-dUTP, Rhodamine Green-5-dUTP, Alexa Fluor 532-5-dUTP, BODIPY TMR-14-dUTP, Tetramethylrhodamine-6-dUTP, Alexa Fluor 546-14-dUTP, Alexa Fluor 568-5-dUTP, Texas Red-12-dUTP, Texas Red-5-dUTP, BODIPY TR-14-dUTP, Alexa Fluor 594-5-dUTP, BODIPY 630/650-14-dUTP, BODIPY 650/665-14-dUTP; Alexa Fluor 488-7-OBEA-dCTP, Alexa Fluor 546-16-OBEA-dCTP, Alexa Fluor 594-7-OBEA-dCTP, Alexa Fluor 647-12-OBEA-dCTP. Fluorescently labeled nucleotides are commercially available and can be purchased from, e.g., Invitrogen.

[0183] In some embodiments, dyes and other moieties, such as quenchers, are introduced into polynucleotide used in the methods described herein, such as FRET probes, via modified nucleotides. A “modified nucleotide” refers to a nucleotide that has been chemically modified, but still functions as a nucleotide. In some embodiments, the modified nucleotide has a chemical moiety, such as a dye or quencher, covalently attached, and can be introduced into a polynucleotide, for example, by way of solid phase synthesis of the polynucleotide. In other embodiments, the modified nucleotide includes one or more reactive groups that can react with a dye or quencher before, during, or after incorporation of the modified nucleotide into the nucleic acid. In specific embodiments, the modified nucleotide is an amine-modified nucleotide, i.e., a nucleotide that has been modified to have a reactive amine group. In some embodiments, the modified nucleotide comprises a modified base moiety, such as uridine, adenosine, guanosine, and/or cytosine. In specific embodiments, the amine-modified nucleotide is selected from 543-aminoallyl)-UTP; 8-[(4-amino)butyl]-amino-ATP and 8-[(6-amino)butyl]-amino-ATP; N6-(4-amino)butyl-ATP, N6-(6-amino)butyl-ATP, N4-[2,2-oxy-bis-(ethylamine)]-CTP; N6-(6-Amino)hexyl-ATP; 8-[(6-Amino)hexyl]-amino-ATP; 5-propargylamino-CTP, 5-propargylamino-UTP. In some embodiments, nucleotides with different nucleobase moieties are similarly modified, for example, 5-(3-aminoallyl)-GTP instead of 5-(3-aminoallyl)-UTP. Many amine modified nucleotides are commercially available from, e.g., Applied Biosystems, Sigma, Jena Bioscience and TriLink.

[0184] Exemplary detectable moieties also include, but are not limited to, members of binding pairs. In some such embodiments, a first member of a binding pair is linked to a polynucleotide. The second member of the binding pair is linked to a detectable label, such as a fluorescent label. When the polynucleotide linked to the first member of the binding pair is incubated with the second member of the binding pair linked to the detectable label, the first and second members of the binding pair associate and the polynucleotide can be detected. Exemplary binding pairs include, but are not limited to, biotin and streptavidin, antibodies and antigens, etc.

[0185] In some embodiments, multiple target RNAs are detected in a single multiplex reaction. In some such embodiments, each probe that is targeted to a unique cDNA is spectrally distinguishable when released from the probe. Thus, each target RNA is detected by a unique fluorescence signal.

[0186] One skilled in the art can select a suitable detection method for a selected assay, e.g., a real-time RT-PCR assay. The selected detection method need not be a method described above, and may be any method.

### 4.2. Exemplary Compositions and Kits

[0187] In another aspect, compositions are provided. In some embodiments, compositions are provided for use in the methods described herein.

[0188] In some embodiments, a composition comprises at least one polynucleotide. In some embodiments, a composition comprises at least one primer. In some embodiments, a composition comprises at least one probe. In some embodiments, a composition comprises at least one primer and at least one probe.

[0189] In some embodiments, compositions are provided that comprise at least one target RNA-specific primer. The term “target RNA-specific primer” encompasses primers that have a region of contiguous nucleotides having a sequence that is (i) identically present in one of SEQ ID NOs: 1 to 397, 1063 to 1210, 1363 to 1707, 2064 to 2183, 2312 to 2452, 2673 to 2680, and 2689, or (ii) complementary to the sequence of a region of contiguous nucleotides found in one of SEQ ID NOs: 1 to 397, 1063 to 1210, 1363 to 1707, 2064 to 2183, 2312 to 2452, 2673 to 2680, and 2689.

[0190] In some embodiments, compositions are provided that comprise at least one target RNA-specific probe. The term “target RNA-specific probe” encompasses probes that have a region of contiguous nucleotides having a sequence that is (i) identically present in one of SEQ ID NOs: 1 to 397, 1063 to 1210, 1363 to 1707, 2064 to 2183, 2312 to 2452, 2673 to 2680, and 2689, or (ii) complementary to the sequence of a region of contiguous nucleotides found in one of SEQ ID NOs: 1 to 397, 1063 to 1210, 1363 to 1707, 2064 to 2183, 2312 to 2452, 2673 to 2680, and 2689.

[0191] In some embodiments, target RNA-specific primers and probes comprise deoxyribonucleotides. In other embodiments, target RNA-specific primers and probes comprise at least one nucleotide analog. Nonlimiting exemplary nucleotide analogs include, but are not limited to, analogs described herein, including LNA analogs and peptide nucleic acid (PNA) analogs. In some embodiments, target RNA-specific primers and probes comprise at least one nucleotide analog which increases the hybridization binding energy (e.g., an affinity-enhancing nucleotide analog, discussed above). In some embodiments, a target RNA-specific primer or probe in the compositions described herein binds to one target RNA in the sample. In some embodiments, a single primer or probe binds to multiple target RNAs, such as multiple isomirs.

[0192] In some embodiments, more than one primer or probe specific for a single target RNA is present in the compositions, the primers or probes capable of binding to overlapping or spatially separated regions of the target RNA.

[0193] It will be understood, even if not explicitly stated hereinafter, that in some embodiments in which the compositions described herein are designed to hybridize to cDNAs reverse transcribed from target RNAs, the composition comprises at least one target RNA-specific primer or probe (or region thereof) having a sequence that is identically present in a target RNA (or region thereof).

[0194] In some embodiments, a target RNA is capable of specifically hybridizing to at least one probe sequence in one of Tables 6, 7, 8, 9, 32, 33, or 34. In some embodiments, a target RNA comprises at least 15 contiguous nucleotides of a sequence selected from SEQ ID NOs: 794 to 1043, 2576 to 2672, and 2692. In some embodiments, a target RNA comprises a sequence that is complementary to at least 15 contiguous nucleotides of a sequence selected from SEQ ID NOs: 1 to 397, 1063 to 1210, 1363 to 1707, 2064 to 2183, 2312 to 2452, 2673 to 2680, and 2689. In some embodiments, a target RNA, in its mature form, comprises fewer than 30 nucleotides. In some embodiments, a target RNA is a microRNA.

[0195] In some embodiments, the composition comprises a plurality of target RNA-specific primers and/or probes for each of at least 2, at least 3, at least 4, at least 5, at least 6, at least 7, or at least 8 target RNAs, the target RNAs comprising a region of contiguous nucleotides having a sequence that is identically present in one of SEQ ID NOs: 794 to 1043, 2576 to 2672, and 2692. In some embodiments, the plurality includes a target RNA-specific primer and/or probe specific for each of at least 2, at least 3, at least 4, at least 5, at least 6, at least 7, at least 8, at least 9, at least 10, at least 11, or at least 12 target RNAs, the target RNAs comprising a region of contiguous nucleotides having a sequence that is identically present in one of SEQ ID NOs: 794 to 1043, 2576 to 2672, and 2692. In some embodiments, the plurality includes a target RNA-specific primer and/or probe specific for each of at least 2, at least 3, at least 4, at least 5, at least 6, at least 7, at least 8, at least 9, at least 10, at least 15, at least 20, at least 25, at least 30, at least 40, at least 50, at least 75, or at least 100 target RNAs comprising a region of contiguous nucleotides having a sequence that is identically present in one of SEQ ID NOs: 794 to 1043, 2576 to 2672, and 2692. It will be understood that, in some embodiments, target RNAs described herein comprise a sequence identically present in a sequence set forth in at least one of Tables 4, 5, and 38. It is understood that where a sequence includes thymine (T) bases, a target RNA may contain uracil (U) bases instead.

[0196] In some embodiments, a composition is an aqueous composition. In some embodiments, the aqueous composition comprises a buffering component, such as phosphate, tris, HEPES, etc., and/or additional components, as discussed below. In some embodiments, a composition is dry, for example, lyophilized, and suitable for reconstitution by addition of fluid. A dry composition may include a buffering component and/or additional components.

[0197] In some embodiments, a composition comprises one or more additional components. Additional components include, but are not limited to, salts, such as NaCl, KCl, and MgCl₂; polymerases, including thermostable polymerases; dNTPs; RNase inhibitors; bovine serum albumin (BSA) and the like; reducing agents, such as β-mercaptoethanol; EDTA and the like; etc. One skilled in the art can select suitable composition components depending on the intended use of the composition.

[0198] In some embodiments, an addressable microarray component is provided that comprises target RNA-specific probes attached to a substrate.

[0199] Microarrays for use in the methods described herein comprise a solid substrate onto which the probes are covalently or non-covalently attached. In some embodiments, probes capable of hybridizing to one or more target RNAs or cDNAs are attached to the substrate at a defined location (“addressable array”). Probes can be attached to the substrate in a wide variety of ways, as will be appreciated by those in the art. In some embodiments, the probes are synthesized first and subsequently attached to the substrate. In other embodiments, the probes are synthesized on the substrate. In some embodiments, probes are synthesized on the substrate surface using techniques such as photopolymerization and photolithography.

[0200] In some embodiments, the solid substrate is a material that is modified to contain discrete individual sites appropriate for the attachment or association of the probes and is amenable to at least one detection method. Representative examples of substrates include glass and modified or functionalized glass, plastics (including acrylics, polystyrene and copolymers of styrene and other materials, polypropylene, polyethylene, polybutylene, polyurethanes, TeflonJ, etc.), polysaccharides, nylon or nitrocellulose, resins, silica or silica-based materials including silicon and modified silicon, carbon, metals, inorganic glasses and plastics. In some embodiments, the substrates allow optical detection without appreciably fluorescing.

[0201] In some embodiments, the substrate is planar. In other embodiments, probes are placed on the inside surface of a tube, such as for flow-through sample analysis to minimize sample volume. In other embodiments, probes can be in the wells of multi-well plates. In still other embodiments, probes can be attached to an addressable microbead array. In yet other embodiments, the probes can be attached to a flexible substrate, such as a flexible foam, including closed cell foams made of particular plastics.

[0202] The substrate and the probe can each be derivatized with functional groups for subsequent attachment of the two. For example, in some embodiments, the substrate is derivatized with one or more chemical functional groups including, but not limited to, amino groups, carboxyl groups, oxo groups and thiol groups. In some embodiments, probes are attached directly to the substrate through one or more functional groups. In some embodiments, probes are attached to the substrate indirectly through a linker (i.e., a region of contiguous nucleotides that space the probe regions involved in hybridization and detection away from the substrate surface). In some embodiments, probes are attached to the solid support through the 5′ terminus. In other embodiments, probes are attached through the 3′ terminus. In still other embodiments, probes are attached to the substrate through an internal nucleotide. In some embodiments the probe is attached to the solid support non-covalently, e.g., via a biotin-streptavidin interaction, wherein the probe biotinylated and the substrate surface is covalently coated with streptavidin.

[0203] In some embodiments, the compositions comprise a microarray having probes attached to a substrate, wherein at least one of the probes (or a region thereof) comprises a sequence that is identically present in, or complementary to a region of, one of SEQ ID NOs: 1 to 397, 1063 to 1210, 1363 to 1707, 2064 to 2183, 2312 to 2452, 2673 to 2680, and 2689. In some embodiments, at least 2, at least 5, at least 10, at least 15, at least 20, at least 25, at least 30, at least 40, at least 50, or at least 100 of the probes comprise a sequence that is identically present in, or complementary to a region of, one of SEQ ID NOs: 1 to 397, 1063 to 1210, 1363 to 1707, 2064 to 2183, 2312 to 2452, 2673 to 2680, and 2689. In some embodiments, the microarray comprises at least one target RNA-specific probe comprising a sequence that is identically present in, or complementary to a region of, one of SEQ ID NOs: 1 to 397, 1063 to 1210, 1363 to 1707, 2064 to 2183, 2312 to 2452, 2673 to 2680, and 2689 and at least one target RNA-specific probe comprising a sequence that is identically present in, or complementary to a region of, a target RNA of the human miRNome. In some embodiments, the microarray comprises each target RNA-specific probe at only one location on the microarray. In some embodiments, the microarray comprises at least one target RNA-specific probe at multiple locations on the microarray.

[0204] As used herein, the terms “complementary” or “partially complementary” to a target RNA (or target region thereof), and the percentage of “complementarity” of the probe sequence to that of the target RNA sequence is the percentage “identity” to the reverse complement of the sequence of the target RNA. In determining the degree of “complementarity” between probes used in the compositions described herein (or regions thereof) and a target RNA, such as those disclosed herein, the degree of “complementarity” is expressed as the percentage identity between the sequence of the probe (or region thereof) and the reverse complement of the sequence of the target RNA that best aligns therewith. The percentage is calculated by counting the number of aligned bases that are identical as between the 2 sequences, dividing by the total number of contiguous nucleotides in the probe, and multiplying by 100.

[0205] In some embodiments, the microarray comprises at least one probe having a region with a sequence that is fully complementary to a target region of a target RNA. In other embodiments, the microarray comprises at least one probe having a region with a sequence that comprises one or more base mismatches when compared to the sequence of the best-aligned target region of a target RNA.

[0206] As noted above, a “region” of a probe or target RNA, as used herein, may comprise or consist of 8, 9, 10, 11, 12, 13, 14, 15, 16, 17, 18, 19, 20, 21, 22, 23, 24, 25, 26, 27, 28, 29 or more contiguous nucleotides from a particular SEQ ID NO or the complement thereof. In some embodiments, the region is of the same length as the probe or the target RNA. In other embodiments, the region is shorter than the length of the probe or the target RNA.

[0207] In some embodiments, the microarray comprises at least one probe having a region of at least 10, at least 11, at least 13, at least 14, at least 15, at least 16, at least 17, at least 18, at least 19, at least 20, at least 21, at least 22, at least 23, at least 24, or at least 25 contiguous nucleotides with a sequence that is identically present in, or complementary to a region of, one of SEQ ID NOs: 1 to 397, 1063 to 1210, 1363 to 1707, 2064 to 2183, 2312 to 2452, 2673 to 2680, and 2689.

[0208] In some embodiments, the microarray comprises at least one probe having a region with a sequence that is identically present in, or complementary to a region of, a probe sequence in one of Tables 6, 7, 8, 9, 32, 33, and 34. In some embodiments, a microarray further comprises at least one probe that does not have a region that is identically present in, or complementary to a region of, a probe sequence in one of Tables 6, 7, 8, 9, 32, 33, and 34.

[0209] In some embodiments, the microarray comprises at least one, at least two, at least three, at least five, at least 10, or at least 15 probes that each comprise a region with a sequence that is identically present in, or complementary to a region of, a probe sequence in Table 6. In some embodiments, the microarray comprises at least one, at least two, at least three, at least five, at least eight, at least 10, at least 12, at least 15, at least 20, or at least 25 probes that each comprise a region with a sequence that is identically present in, or complementary to a region of, a probe sequence in Table 7. In some embodiments, the microarray comprises at least one, at least two, at least three, at least five, at least six, or at least seven probes that each comprise a region with a sequence that is identically present in, or complementary to a region of, a probe sequence in Table 8. In some embodiments, the microarray comprises at least one, at least two, at least three, at least four, at least five, at least ten, at least 15, at least 20, at least 25, at least 30, at least 40, or at least 50 probes that each comprise a region with a sequence that is identically present in, or complementary to a region of, a probe sequence in Table 9. In some embodiments, the microarray comprises at least one, at least two, at least five, at least 10, at least 15, at least 20, at least 25, at least 30, or at least 40 probes that each comprise a region with a sequence that is identically present in, or complementary to a region of, a probe sequence in one of Tables 32 or 33. In some embodiments, the microarray comprises at least one, at least two, at least five, at least 10, at least 15, at least 20, at least 30, at least 40, at least 50, at least 60, or at least 70 probes that each comprise a region with a sequence that is identically present in, or complementary to a region of, a probe sequence in Table 34.

[0210] In some embodiments, the microarrays comprise probes having a region with a sequence that is complementary to target RNAs that comprise a substantial portion of the human miRNome (i.e., the publicly known microRNAs that have been accessioned by others into miRBase (http://microrna.sanger.ac.uk/ at the time the microarray is fabricated), such as at least about 60%, at least about 70%, at least about 80%, at least about 90%, or at least about 95% of the human miRNome. In some embodiments, the microarrays comprise probes that have a region with a sequence that is identically present in target RNAs that comprise a substantial portion of the human miRNome, such as at least about 60%, at least about 70%, at least about 80%, at least about 90%, or at least about 95% of the human miRNome.

[0211] In some embodiments, components are provided that comprise probes attached to microbeads, such as those sold by Luminex, each of which is internally dyed with red and infrared fluorophores at different intensities to create a unique signal for each bead. In some embodiments, the compositions useful for carrying out the methods described herein include a plurality of microbeads, each with a unique spectral signature. Each uniquely labeled microbead is attached to a unique target RNA-specific probe such that the unique spectral signature from the dyes in the bead is associated with a particular probe sequence. Nonlimiting exemplary probe sequences include SEQ ID NOs: 1 to 397, 1063 to 1210, 1363 to 1707, 2064 to 2183, 2312 to 2452, 2673 to 2680, and 2689. Nonlimiting exemplary probe sequences also include probes comprising a region that is identically present in, or complementary to, a sequence selected from SEQ ID NOs: 1 to 397, 1063 to 1210, 1363 to 1707, 2064 to 2183, 2312 to 2452, 2673 to 2680, and 2689. In some embodiments, a probe sequence comprises at least 8, at least 9, at least 10, at least 11, at least 12, at least 13, at least 14, at least 15, at least 16, at least 17, at least 18, at least 19, at least 20, at least 21, at least 22, at least 23, or at least 24 contiguous nucleotides that are identically present in, or complementary to a region of, one of SEQ ID NOs: 1 to 397, 1063 to 1210, 1363 to 1707, 2064 to 2183, 2312 to 2452, 2673 to 2680, and 2689.

[0212] In some embodiments, a uniquely labeled microbead has attached thereto a probe having a region with a sequence that is identically present in, or complementary to a region of, one of SEQ ID NOs: 1 to 397, 1063 to 1210, 1363 to 1707, 2064 to 2183, 2312 to 2452, 2673 to 2680, and 2689. In other embodiments, the uniquely labeled microbead has attached thereto a probe having a region with a sequence that comprises one or more base mismatches when compared to the most similar sequence selected from SEQ ID NOs: 1 to 397, 1063 to 1210, 1363 to 1707, 2064 to 2183, 2312 to 2452, 2673 to 2680, and 2689, and sequences complementary to SEQ ID NOs: 1 to 397, 1063 to 1210, 1363 to 1707, 2064 to 2183, 2312 to 2452, 2673 to 2680, and 2689.

[0213] In some embodiments, a composition is provided that comprises a plurality of uniquely labeled microbeads, wherein at least one microbead has attached thereto a probe having a region of at least 10, at least 11, at least 13, at least 14, at least 15, at least 16, at least 17, at least 18, at least 19, at least 20, at least 21, at least 22, at least 23, at least 24, or at least 25 contiguous nucleotides with a sequence that is identically present in, or complementary to a region of, one of SEQ ID NOs: 1 to 397, 1063 to 1210, 1363 to 1707, 2064 to 2183, 2312 to 2452, 2673 to 2680, and 2689.

[0214] In some embodiments, a composition is provided that comprises a plurality of uniquely labeled microbeads, wherein at least one microbead has attached thereto a probe having a region of at least 10, at least 11, at least 13, at least 14, at least 15, at least 16, at least 17, at least 18, at least 19, at least 20, at least 21, at least 22, at least 23, at least 24, or at least 25 contiguous nucleotides with a sequence that is identically present in, or complementary to a region of, a probe sequence in one of Tables 6, 7, 8, 9, 32, 33, and 34. In some embodiments, the composition further comprises at least one uniquely labeled microbead having attached thereto a probe that does not have a region that is identically present in, or complementary to a region of, a probe sequence in one of Tables 6, 7, 8, 9, 32, 33, and 34.

[0215] In some embodiments, the compositions comprise at least one, at least two, at least three, at least five, at least 10, or at least 15 uniquely labeled microbeads that each have attached thereto a unique target RNA-specific probe having a region with a sequence that is identically present in, or complementary to a region of, a probe sequence in Table 6. In some embodiments, the compositions comprise at least one, at least two, at least three, at least five, at least eight, at least 10, at least 12, at least 15, at least 20, or at least 25 uniquely labeled microbeads that each have attached thereto a unique target RNA-specific probe having a region with a sequence that is identically present in, or complementary to a region of, a probe sequence in Table 7. In some embodiments, the compositions comprise at least one, at least two, at least three, at least five, at least six, or at least seven uniquely labeled microbeads that each have attached thereto a unique target RNA-specific probe having a region with a sequence that is identically present in, or complementary to a region of, a probe sequence in Table 8. In some embodiments, the compositions comprise at least one, at least two, at least three, at least four, at least five, at least ten, at least 15, at least 20, at least 25, at least 30, at least 40, or at least 50 uniquely labeled microbeads that each have attached thereto a unique target RNA-specific probe having a region with a sequence that is identically present in, or complementary to a region of, a probe sequence in Table 9. In some embodiments, the compositions comprise at least one, at least two, at least five, at least 10, at least 15, at least 20, at least 25, at least 30, or at least 40 uniquely labeled microbeads that each have attached thereto a unique target RNA-specific probe having a region with a sequence that is identically present in, or complementary to a region of, a probe sequence in one of Tables 32 or 33. In some embodiments, the compositions comprise at least one, at least two, at least five, at least 10, at least 15, at least 20, at least 30, at least 40, at least 50, at least 60, or at least 70 uniquely labeled microbeads that each have attached thereto a unique target RNA-specific probe having a region with a sequence that is identically present in, or complementary to a region of, a probe sequence in Table 34.

[0216] In some embodiments, the compositions comprise a plurality of uniquely labeled microbeads, wherein the plurality comprises at least one microbead having attached thereto a probe having a region with a sequence that is identically present in, or complementary to a region of, one of SEQ ID NOs: 1 to 397, 1063 to 1210, 1363 to 1707, 2064 to 2183, 2312 to 2452, 2673 to 2680, and 2689. In some embodiments, the plurality comprises at least two, at least five, at least 10, at least 15, at least 20, at least 25, at least 30, at least 40, at least 50, at least 60, at least 75, or at least 100 microbeads each of which having attached thereto a probe having a region with a sequence that is identically present in, or complementary to a region of, one of SEQ ID NOs: 1 to 397, 1063 to 1210, 1363 to 1707, 2064 to 2183, 2312 to 2452, 2673 to 2680, and 2689. In some embodiments, a composition comprises at least one uniquely labeled microbead having attached thereto a target RNA-specific probe having a region with a sequence that is not present in, or complementary to a region of, any of SEQ ID NOs: 1 to 397, 1063 to 1210, 1363 to 1707, 2064 to 2183, 2312 to 2452, 2673 to 2680, and 2689.

[0217] In some embodiments, the compositions comprise a plurality of uniquely labeled microbeads, at least one of which has attached thereto a probe having a region with a sequence that identically present in, or complementary to a region of, one of SEQ ID NOs: 1 to 397, 1063 to 1210, 1363 to 1707, 2064 to 2183, 2312 to 2452, 2673 to 2680, and 2689 and at least a second bead that has attached thereto a probe having a region with a sequence that is identically present in, or complementary to a region of, a target RNA from the human miRNome.

[0218] In some embodiments, the compositions comprise a plurality of uniquely labeled microbeads, each of which has attached thereto a unique probe having a region that is complementary to target RNAs that comprise a substantial portion of the human miRNome, such as at least about 60%, at least about 70%, at least about 80%, at least about 90%, or at least about 95% of the human miRNome. In some embodiments, the compositions comprise a plurality of uniquely labeled microbeads having attached thereto a unique probe having a region with a sequence that is identically present in target RNAs that comprise a substantial portion of the human miRNome, such as at least about 60%, at least about 70%, at least about 80%, at least about 90%, or at least about 95% of the human miRNome.

[0219] In some embodiments, compositions are provided that comprise at least one polynucleotide for detecting at least one target RNA. In some embodiments, the polynucleotide is used as a primer for a reverse transcriptase reaction. In some embodiments, the polynucleotide is used as a primer for amplification. In some embodiments, the polynucleotide is used as a primer for RT-PCR. In some embodiments, the polynucleotide is used as a probe for detecting at least one target RNA. In some embodiments, the polynucleotide is detectably labeled. In some embodiments, the polynucleotide is a FRET probe. In some embodiments, the polynucleotide is a TaqMan® probe, a Molecular Beacon, or a Scorpion probe.

[0220] In some embodiments, a composition comprises at least one FRET probe having a sequence that is identically present in, or complementary to a region of, one of SEQ ID NOs: 1 to 397, 1063 to 1210, 1363 to 1707, 2064 to 2183, 2312 to 2452, 2673 to 2680, and 2689. In some embodiments, a composition comprises at least two, at least five, at least 10, at least 15, at least 20, at least 25, at least 30, at least 40, at least 50, at least 60, at least 75, or at least 100 FRET probes, each of which has a sequence that is identically present in, or complementary to a region of, a different one of SEQ ID NOs: 1 to 397, 1063 to 1210, 1363 to 1707, 2064 to 2183, 2312 to 2452, 2673 to 2680, and 2689.

[0221] In some embodiments, a FRET probe is labeled with a donor/acceptor pair such that when the probe is digested during the PCR reaction, it produces a unique fluorescence emission that is associated with a specific target RNA. In some embodiments, when a composition comprises multiple FRET probes, each probe is labeled with a different donor/acceptor pair such that when the probe is digested during the PCR reaction, each one produces a unique fluorescence emission that is associated with a specific probe sequence and/or target RNA. In some embodiments, the sequence of the FRET probe is complementary to a target region of a target RNA. In other embodiments, the FRET probe has a sequence that comprises one or more base mismatches when compared to the sequence of the best-aligned target region of a target RNA.

[0222] In some embodiments, a composition comprises a FRET probe consisting of at least 8, at least 9, at least 10, at least 11, at least 13, at least 14, at least 15, at least 16, at least 17, at least 18, at least 19, at least 20, at least 21, at least 22, at least 23, at least 24, or at least 25 nucleotides, wherein at least a portion of the sequence is identically present in, or complementary to a region of, one of SEQ ID NOs: 1 to 397, 1063 to 1210, 1363 to 1707, 2064 to 2183, 2312 to 2452, 2673 to 2680, and 2689. In some embodiments, at least 8, at least 9, at least 10, at least 11, at least 13, at least 14, at least 15, at least 16, at least 17, at least 18, at least 19, at least 20, at least 21, at least 22, at least 23, at least 24, or at least 25 nucleotides of the FRET probe are identically present in, or complementary to a region of, one of SEQ ID NOs: 1 to 397, 1063 to 1210, 1363 to 1707, 2064 to 2183, 2312 to 2452, 2673 to 2680, and 2689. In some embodiments, the FRET probe has a sequence with one, two or three base mismatches when compared to the sequence or complement of one of SEQ ID NOs: 1 to 397, 1063 to 1210, 1363 to 1707, 2064 to 2183, 2312 to 2452, 2673 to 2680, and 2689.

[0223] In some embodiments, a composition comprises a FRET probe consisting of at least 8, at least 9, at least 10, at least 11, at least 13, at least 14, at least 15, at least 16, at least 17, at least 18, at least 19, at least 20, at least 21, at least 22, at least 23, at least 24, or at least 25 nucleotides, wherein at least a portion of the sequence is identically present in, or complementary to a region of, a probe sequence in one of Tables 6, 7, 8, 9, 32, 33, and 34. In some embodiments, a composition comprises at least one FRET probe that does not comprise a portion that is identically present in, or complementary to a region of, a probe sequence in one of Tables 6, 7, 8, 9, 32, 33, and 34.

[0224] In some embodiments, the compositions comprise at least one, at least two, at least three, at least five, at least 10, or at least 15 uniquely labeled target RNA-specific FRET probes, each comprising a sequence that is identically present in, or complementary to a region of, a probe sequence in Table 6. In some embodiments, the compositions comprise at least one, at least two, at least three, at least five, at least eight, at least 10, at least 12, at least 15, at least 20, or at least 25 uniquely labeled target RNA-specific FRET probes, each of which comprises a sequence that is identically present in, or complementary to a region of, a probe sequence in Table 7. In some embodiments, the compositions comprise at least one, at least two, at least three, at least five, at least six, or at least seven uniquely labeled target RNA-specific FRET probes, each of which comprises a sequence that is identically present in, or complementary to a region of, a probe sequence in Table 8. In some embodiments, the compositions comprise at least one, at least two, at least three, at least four, at least five, at least ten, at least 15, at least 20, at least 25, at least 30, at least 40, or at least 50 uniquely labeled target RNA-specific FRET probes, each of which comprises a sequence that is identically present in, or complementary to a region of, a probe sequence in Table 9. In some embodiments, the compositions comprise at least one, at least two, at least five, at least 10, at least 15, at least 20, at least 25, at least 30, or at least 40 uniquely labeled target RNA-specific FRET probes, each of which comprises a sequence that is identically present in, or complementary to a region of, a probe sequence in one of Tables 32 or 33. In some embodiments, the compositions comprise at least one, at least two, at least five, at least 10, at least 15, at least 20, at least 30, at least 40, at least 50, at least 60, or at least 70 uniquely labeled target RNA-specific FRET probes, each of which comprises a sequence that is identically present in, or complementary to a region of, a probe sequence in Table 34.

[0225] In some embodiments, a kit comprises a polynucleotide discussed above. In some embodiments, a kit comprises at least one primer and/or probe discussed above. In some embodiments, a kit comprises at least one polymerase, such as a thermostable polymerase. In some embodiments, a kit comprises dNTPs. In some embodiments, kits for use in the real time RT-PCR methods described herein comprise one or more target RNA-specific FRET probes and/or one or more primers for reverse transcription of target RNAs and/or one or more primers for amplification of target RNAs or cDNAs reverse transcribed therefrom.

[0226] In some embodiments, one or more of the primers and/or probes is “linear”. A “linear” primer refers to a polynucleotide that is a single stranded molecule, and typically does not comprise a short region of, for example, at least 3, 4 or 5 contiguous nucleotides, which are complementary to another region within the same polynucleotide such that the primer forms an internal duplex. In some embodiments, the primers for use in reverse transcription comprise a region of at least 4, at least 5, at least 6, at least 7 or more contiguous nucleotides at the 3′-end that has a sequence that is complementary to region of at least 4, at least 5, at least 6, at least 7 or more contiguous nucleotides at the 5′-end of a target RNA.

[0227] In some embodiments, a kit comprises one or more pairs of linear primers (a “forward primer” and a “reverse primer”) for amplification of a cDNA reverse transcribed from a target RNA. Accordingly, in some embodiments, a first primer comprises a region of at least 4, at least 5, at least 6, at least 7, at least 8, at least 9, or at least 10 contiguous nucleotides having a sequence that is identical to the sequence of a region of at least 4, at least 5, at least 6, at least 7, at least 8, at least 9, or at least 10 contiguous nucleotides at the 5′-end of a target RNA. Furthermore, in some embodiments, a second primer comprises a region of at least 4, at least 5, at least 6, at least 7, at least 8, at least 9, or at least 10 contiguous nucleotides having a sequence that is complementary to the sequence of a region of at least 4, at least 5, at least 6, at least 7, at least 8, at least 9, or at least 10 contiguous nucleotides at the 3′-end of a target RNA. In some embodiments, the kit comprises at least a first set of primers for amplification of a cDNA that is reverse transcribed from a target RNA capable of specifically hybridizing to a nucleic acid comprising a sequence identically present in one of SEQ ID NOs: 1 to 397, 1063 to 1210, 1363 to 1707, 2064 to 2183, 2312 to 2452, 2673 to 2680, and 2689 and/or a cDNA that is reverse transcribed from a target RNA that comprises at least 15 contiguous nucleotides of a sequence selected from SEQ ID NOs: 794 to 1043, 2576 to 2672, and 2692.

[0228] In some embodiments, the kit comprises at least two, at least five, at least 10, at least 15, at least 20, at least 25, at least 30, at least 40, at least 50, at least 60, at least 75, or at least 100 sets of primers, each of which is for amplification of a cDNA that is reverse transcribed from a different target RNA capable of specifically hybridizing to a sequence selected from SEQ ID NOs: 1 to 397, 1063 to 1210, 1363 to 1707, 2064 to 2183, 2312 to 2452, 2673 to 2680, and 2689 and/or a cDNA that is reverse transcribed from a target RNA that comprises at least 15 contiguous nucleotides of a sequence selected from SEQ ID NOs: 794 to 1043, 2576 to 2672, and 2692. In some embodiments, the kit comprises at least one set of primers that is capable of amplifying more than one cDNA reverse transcribed from a target RNA in a sample.

[0229] In some embodiments, probes and/or primers for use in the compositions described herein comprise deoxyribonucleotides. In some embodiments, probes and/or primers for use in the compositions described herein comprise deoxyribonucleotides and one or more nucleotide analogs, such as LNA analogs or other duplex-stabilizing nucleotide analogs described above. In some embodiments, probes and/or primers for use in the compositions described herein comprise all nucleotide analogs. In some embodiments, the probes and/or primers comprise one or more duplex-stabilizing nucleotide analogs, such as LNA analogs, in the region of complementarity.

[0230] In some embodiments, the compositions described herein also comprise probes, and in the case of RT-PCR, primers, that are specific to one or more housekeeping genes for use in normalizing the quantities of target RNAs. Such probes (and primers) include those that are specific for one or more products of housekeeping genes selected from U6 snRNA, RNU44, RNU48, U47, 7SL scRNA, U1 snRNA, 5.8S rRNA, and U87 scaRNA.

[0231] In some embodiments, the kits for use in real time RT-PCR methods described herein further comprise reagents for use in the reverse transcription and amplification reactions. In some embodiments, the kits comprise enzymes such as reverse transcriptase, and a heat stable DNA polymerase, such as Taq polymerase. In some embodiments, the kits further comprise deoxyribonucleotide triphosphates (dNTPs) for use in reverse transcription and amplification. In further embodiments, the kits comprise buffers optimized for specific hybridization of the probes and primers.

[0232] 4.2.1. Exemplary Normalization of RNA Levels

[0233] In some embodiments, quantitation of target RNA expression levels requires assumptions to be made about the total RNA per cell and the extent of sample loss during sample preparation. In order to correct for differences between different samples or between samples that are prepared under different conditions, the quantities of target RNAs in some embodiments are normalized to the expression of at least one endogenous housekeeping gene.

[0234] Appropriate genes for use as reference genes in the methods described herein include those as to which the quantity of the product does not vary between normal samples and samples from lung cancer patients, or between different cell lines or under different growth and sample preparation conditions. In some embodiments, endogenous housekeeping genes useful as normalization controls in the methods described herein include, but are not limited to, U6 snRNA, RNU44, RNU48, U47, 7SL scRNA, U1 snRNA, 5.8S rRNA, and U87 scaRNA. In typical embodiments, the at least one endogenous housekeeping gene for use in normalizing the measured quantity of microRNAs is selected from U6 snRNA, RNU44, RNU48, U47, 7SL scRNA, U1 snRNA, 5.8S rRNA, and U87 scaRNA. In some embodiments, one housekeeping gene is used for normalization. In some embodiments, more than one housekeeping gene is used for normalization.

[0235] 4.2.2. Exemplary Qualitative Methods

[0236] In some embodiments, methods comprise detecting a qualitative change in a target RNA profile generated from a human sample as compared to a normal target RNA profile (in some exemplary embodiments, a target RNA profile of a control sample). Some qualitative changes in the expression profile are indicative of the presence of lung cancer in a sample from a subject. The term “target RNA profile” refers to a set of data regarding the concurrent expression of a plurality of target RNAs in the same sample.

[0237] In some embodiments, at least one, at least two, at least three, at least five, at least 10, or at least 15 of the target RNAs of the plurality of target RNAs are capable of specifically hybridizing to a probe sequence in Table 6. In some embodiments, at least one, at least two, at least three, at least five, at least eight, at least 10, at least 12, at least 15, at least 20, or at least 25 of the target RNAs of the plurality of target RNAs are capable of specifically hybridizing to a a probe sequence in Table 7. In some embodiments, at least one, at least two, at least three, at least five, at least six, or at least seven of the target RNAs of the plurality of target RNAs are capable of specifically hybridizing to a probe sequence in Table 8. In some embodiments, at least one, at least two, at least three, at least four, at least five, at least ten, at least 15, at least 20, at least 25, at least 30, at least 40, or at least 50 of the target RNAs of the plurality of target RNAs are capable of specifically hybridizing to a probe sequence in Table 9. In some embodiments, at least one, at least two, at least five, at least 10, at least 15, at least 20, at least 25, at least 30, or at least 40 of the target RNAs of the plurality of target RNAs are capable of specifically hybridizing to a probe sequence in one of Table 32 or 33. In some embodiments, at least one, at least two, at least five, at least 10, at least 15, at least 20, at least 30, at least 40, at least 50, at least 60, or at least 70 of the target RNAs of the plurality of target RNAs is capable of specifically hybridizing to a probe sequence in Table 34.

[0238] In some embodiments, at least one, at least two, at least five, at least 10, at least 15, at least 20, at least 25, at least 30, at least 40, at least 50, at least 60, or at least 75 of the plurality of target RNAs comprises a sequence that is complementary to at least 15 contiguous nucleotides of a sequence selected from SEQ ID NOs: 1 to 397, 1063 to 1210, 1363 to 1707, 2064 to 2183, 2312 to 2452, 2673 to 2680, and 2689. In some embodiments, at least one, at least two, at least five, at least 10, at least 15, at least 20, at least 25, at least 30, at least 40, at least 50, at least 60, or at least 70 of the plurality of target RNAs comprises at least 15 contiguous nucleotides of a sequence selected from SEQ ID NOs: 794 to 1043, 2576 to 2672, and 2692. In some embodiments, a target RNA, in its mature form, comprises fewer than 30 nucleotides. In some embodiments, a target RNA is a microRNA.

[0239] Qualitative expression data for use in preparing target RNA expression profiles is obtained using any suitable analytical method, including the analytical methods presented herein.

[0240] In some embodiments, for example, concurrent expression data are obtained using, e.g., a microarray, as described above. Thus, in addition to use for quantitative expression level assays of specific target RNAs as described above, a microarray comprising probes having sequences that are complementary to a substantial portion of the miRNome may be employed to carry out target RNA gene expression profiling, for analysis of target RNA expression patterns.

[0241] In some embodiments, distinct target RNA signatures are associated with established markers for lung cancer. In some embodiments, distinct target RNA signatures are associated with established markers for lung cancer caused by bacterial infection, such as for lung cancer caused by gram-positive bacterial infection, lung cancer caused by gram-negative bacterial infection or lung cancer caused by mycobacterial infection. In some embodiments, distinct target RNA signatures are associated with established markers for lung cancer caused by viral infection. In some embodiments, distinct target RNA signatures are associated with established markers for lung cancer caused by multiple infection, such as by co-infection with bacteria and viruses, or by co-infection with more than one viral or more than one bacterial strain. In some embodiments, distinct target RNA signatures are associated directly with the level of severity of the lung cancer.

[0242] According to the expression profiling method, in some embodiments, total RNA from a sample from a subject suspected of having lung cancer is quantitatively reverse transcribed to provide a set of labeled oligonucleotides complementary to the RNA in the sample. The oligonucleotides are then hybridized to a microarray comprising target RNA-specific probes to provide a hybridization profile for the sample. The result is a hybridization profile for the sample representing the expression pattern of target RNAs in the sample. The hybridization profile comprises the signal from the binding of the oligonucleotides reverse transcribed from the sample to the target RNA-specific probes in the microarray. In some embodiments, the profile is recorded as the presence or absence of binding (signal vs. zero signal). In some embodiments, the profile recorded includes the intensity of the signal from each hybridization. The profile is compared to the hybridization profile generated from a normal, i.e., nonseptic sample, or in some embodiments, a control sample. An alteration in the signal is indicative of the presence of lung cancer in the subject.

### 4.3. Exemplary Additional Target RNAs

[0243] In some embodiments, in combination with detecting one or more target RNAs that are capable of specifically hybridizing to a nucleic acid comprising a sequence selected from SEQ ID NOs: 1 to 397, 1063 to 1210, 1363 to 1707, 2064 to 2183, 2312 to 2452, 2673 to 2680, and 2689 and/or detecting one or more target RNAs comprising at least 15 contiguous nucleotides of a sequence selected from SEQ ID NOs: 794 to 1043, 2576 to 2672, and 2692 and/or detecting one or more target RNAs that comprise a sequence that is complementary to at least 15 contiguous nucleotides of a sequence selected from SEQ ID NOs: 1 to 397, 1063 to 1210, 1363 to 1707, 2064 to 2183, 2312 to 2452, 2673 to 2680, and 2689, methods herein further comprise detecting the level(s) of expression of at least one other marker associated with lung cancer.

[0244] In some embodiments, the methods described herein further comprise detecting altered expression of lung cancer-associated small RNAs with non-canonical hairpins.

[0245] In alternative embodiments, the methods described herein further comprise detecting chromosomal codependents, i.e., target RNAs clustered near each other in the human genome which tend to be regulated together. Accordingly, in further embodiments, the methods comprise detecting the expression of one or more target microRNAs, each situated within the chromosome no more than 50,000 by from the chromosomal location of the pre-microRNA sequences in Tables 3, 22, 25, 29, and 31.

[0246] In some embodiments, the methods comprise detecting the expression of one or more target RNAs clustered on chromosome 8 at 8p21.3-21.2, at 8p12, at 8p11.21, at 8q11.21, at 8q21.11, or at 8q24.22-24.3; on chromosome 9 at 9p21.3, at 9p13.3, at 9p11.2, at 9q22.32, at 9q31.3-34.11, or at 9q34.3; on chromosome 10 at 10q21.3-23.31, at 10q24.1, at 10q24.32, at 10q25.3, or at 10q26.3; on chromosome 11 at 11p15.5, at 11p14.1, at 11q12.1-23.2, at 11q13.4-14.1, at 11q23.2-24.1, or at 11q25; on chromosome 12 at 12p13.32-13.31, at 12p13.1, at 12p12.1, at 12q12-14.1, at 12q14.3-21.1, at 12q21.32-23.2, or at 12q24.23; on chromosome 13 at 13q13.3, at 13q14.2, at 13q21.33, at 13q22.3, or at 13q31.3; at chromosome 14 at 14q11.1-13.2, at 14q24.3-31.1, or at 14q32.2-32.31; on chromosome 15 at 15q3, at 15q23-24.32, or at 15q25.3-26.2; on chromosome 16 at 16p13.3-13.2, at 16p11.2, or at 16q12.1-22.3; on chromosome 17 at 17p13.3, at 17p13.1-11.2, at 17q12-21.1, at 17q22-23.3, or at 17q25.31; on chromosome 18 at 18q11.2, at 18q21.31-33, or at 18q22.3; on chromosome 19 at 19p13.3-13.2, at 19p13.12-12, at 19q12, or at 19q13.32-13.42; on chromosome 20 at 20p13, at 20p11.1, at 20q12, or at 20q13.32; on chromosome 21 at 21q21.1-22.11; on chromosome 22 at 22q11.21, or at 22q12.1-13.31; or on the X chromosome at Xp11.4-11.22, at Xq13.1-13.3, at Xq22.3, at Xq25-27.1, or at Xq27.3-28.

### 4.4. Pharmaceutical Compositions and Methods of Treatment

[0247] In some embodiments, the disclosure relates to methods of treating lung cancer in which expression of a target RNA is deregulated, e.g., either down-regulated or up-regulated in the lung cancer cells of an individual. When at least one target RNA is up-regulated in the cancer cells, the method comprises administering to the individual an effective amount of at least one compound that inhibits the expression of the at least one target RNA, such that proliferation of lung cancer cells is inhibited. Alternatively, in some embodiments, when at least one target RNA is up-regulated in the cancer cells, the method comprises administering to the individual an effective amount of at least one compound that inhibits the activity of the at least one target RNA, such that proliferation of lung cancer cells is inhibited. Such a compound may be, in some embodiments, a polynucleotide, including a polynucleotide comprising modified nucleotides.

[0248] When at least one target RNA is down-regulated in the lung cancer cells, the method comprises administering an effective amount of an isolated target RNA (i.e., in some embodiments, a target RNA that is chemically synthesized, recombinantly expressed or purified from its natural environment), or an isolated variant or biologically-active fragment thereof, such that proliferation of cancer cells in the individual is inhibited.

[0249] The disclosure further provides pharmaceutical compositions for treating lung cancer. In some embodiments, the pharmaceutical compositions comprise at least one isolated target RNA, or an isolated variant or biologically-active fragment thereof, and a pharmaceutically-acceptable carrier. In some embodiments, the at least one isolated target RNA corresponds to a target RNA that exhibits a decreased level of expression in lung cancer cells relative to normal levels (in some exemplary embodiments, relative to the level of the target RNA in a control sample). In some embodiments, the isolated target RNA is a target RNA that is capable of selectively hybridizing to at least one nucleic acid probe comprising a sequence that is identically present in one of SEQ ID NOs: 1 to 397, 1363 to 1707, and 2312 to 2452. In some embodiments, the isolated target RNA that has a decreased level of expression in lung cancer relative to normal levels is capable of selectively hybridizing to at least one nucleic acid probe comprising a sequence that is identically present in one of SEQ ID NOs: 92 or 171, or a sequence that is identically present in the probe sequences of Table 34.

[0250] In some embodiments, the pharmaceutical compositions are useful for treating adenocarcinoma and comprise an isolated target RNA that is capable of selectively hybridizing to at least one nucleic acid probe comprising a sequence that is identically present in one of SEQ ID NOs: 4, 36, 50, 93, 122, 125, 139, 140, 144, 146, 159, 226, 239 or 241. In some embodiments, the pharmaceutical compositions are useful for treating adenocarcinoma and comprise an isolated target RNA that is capable of selectively hybridizing to at least one nucleic acid probe comprising a sequence that is identically present in one of SEQ ID NOs: 19, 27, 33, 48, 55, 72, 73, 94, 101, 105, 112, 117, 130, 131, 133, 134, 135, 143, 155, 158, 160, 161, 163, 165, 221, 238, 240 or 246.

[0251] In some embodiments the isolated target RNA is identical to an endogenous wild-type target RNA gene product (such as a product of a gene set forth in Table 3) that is down-regulated in the cancer cell. In some embodiments, the isolated target RNA is a variant target RNA or biologically active fragment thereof. As used herein, a “variant” refers to a target RNA gene product that has less than 100% sequence identity to the corresponding wild-type target RNA, but still possesses one or more biological activities of the wild-type target RNA (e.g., ability to inhibit expression of a target RNA molecule and cellular processes associated with lung cancer). A “biologically active fragment” of a target RNA is a fragment of the target RNA gene product that possesses one or more biological activities of the wild-type target RNA. In some embodiments, the isolated target RNA can be administered with one or more additional anti-cancer treatments including, but not limited to, chemotherapy, radiation therapy and combinations thereof. In some embodiments, the isolated target RNA is administered concurrently with additional anti-cancer treatments. In some embodiments, the isolated target RNA is administered sequentially to additional anti-cancer treatments.

[0252] In some embodiments, the pharmaceutical compositions comprise at least one compound that inhibits expression of the target RNA. In some embodiments, the compound is specific for one or more target RNAs, the expression of which is increased in lung cancer cells relative to normal levels (in some exemplary embodiments, relative to the level of the target RNA in a control sample). In some embodiments, the target RNA expression inhibitor is specific for at least one target RNA that is capable of selectively hybridizing to at least one nucleic acid probe comprising a sequence that is identically present in one of SEQ ID NOs: 1 to 397, 1063 to 1210, 2064 to 2183, 2673 to 2680, and 2689. In some embodiments, the target RNA expression inhibitor is specific for at least one target RNA that is capable of selectively hybridizing to at least one nucleic acid probe comprising a sequence that is identically present in one of SEQ ID NOs: 15, 26, 27 or 191. In some embodiments, the target RNA expression inhibitor is specific for at least one target RNA that is capable of selectively hybridizing to at least one nucleic acid probe comprising a sequence that is identically present in one of SEQ ID NOs: 15, 26, 27, 30, 129, 164, 184, 191, 196, 205, 207, 214, 219, 225, 246 or 248. In some embodiments, the target RNA expression inhibitor is specific for at least one target RNA that is capable of selectively hybridizing to at least one nucleic acid probe in one of Tables 6, 7, 8, 9, 32, and 33. In some embodiments, a target RNA expression inhibitor that is specific for at least one target RNA that is capable of selectively hybridizing to at least one nucleic acid probe in Table 6 is useful for treating non-small cell lung cancer. In some embodiments, a target RNA expression inhibitor that is specific for at least one target RNA that is capable of selectively hybridizing to at least one nucleic acid probe in Table 7 is useful for treating squamous cell carcinoma. In some embodiments, a target RNA expression inhibitor that is specific for at least one target RNA that is capable of selectively hybridizing to at least one nucleic acid probe in Table 8 is useful for treating adenocarcinoma. In some embodiments, a target RNA expression inhibitor that is specific for at least one target RNA that is capable of selectively hybridizing to at least one nucleic acid probe in Table 9 is useful for treating aggressive forms of lung cancer.

[0253] In some embodiments, the pharmaceutical compositions are useful for treating squamous cell carcinoma and comprise a target RNA expression inhibitor that is specific to a target RNA capable of selectively hybridizing to at least one nucleic acid probe comprising a sequence that is identically present in one of SEQ ID NOs: 4, 36, 50, 93, 122, 125, 139, 140, 144, 146, 159, 226, 239 and 241. In some embodiments, the pharmaceutical compositions are useful for treating squamous cell carcinoma and comprise a target RNA expression inhibitor that is specific to a target RNA capable of selectively hybridizing to at least one nucleic acid probe comprising a sequence that is identically present in one of SEQ ID NOs: 19, 27, 19, 27, 33, 48, 55, 72, 73, 94, 101, 105, 112, 117, 130, 131, 133, 134, 135, 143, 155, 158, 160, 161, 163, 165, 221, 238, 240 or 246. In some embodiments, the pharmaceutical compositions are useful for treating squamous cell carcinoma and comprise a target RNA expression inhibitor that is specific to a target RNA capable of selectively hybridizing to at least one nucleic acid probe in Table 7. In some embodiments, the pharmaceutical compositions are useful for treating adenocarcinoma and comprise a target RNA expression inhibitor that is specific to a target RNA capable of selectively hybridizing to at least one nucleic acid probe in Table 8. In some embodiments, the pharmaceutical compositions are useful for treating aggressive forms of lung cancer and comprise a target RNA expression inhibitor that is specific to a target RNA capable of selectively hybridizing to at least one nucleic acid probe in Table 9.

[0254] In some embodiments, the target RNA inhibitor is selected from double-stranded RNA, antisense nucleic acids and enzymatic RNA molecules. In some embodiments, the target RNA inhibitor is a small molecule inhibitor. In some embodiments, the target RNA inhibitor can be administered in combination with other anti-cancer treatments, including but not limited to, chemotherapy, radiation therapy and combinations thereof. In some embodiments, the target RNA inhibitor is administered concurrently with other anti-cancer treatments. In some embodiments, the target RNA inhibitor is administered sequentially to other anti-cancer treatments.

[0255] In some embodiments, a pharmaceutical composition is formulated and administered according to Semple et al., Nature Biotechnology advance online publication, 17 Jan. 2010 (doi:10.1038/nbt.1602)), which is incorporated by reference herein in its entirety for any purpose.

[0256] The terms “treat,” “treating” and “treatment” as used herein refer to ameliorating symptoms associated with lung cancer, including preventing or delaying the onset of symptoms and/or lessening the severity or frequency of symptoms of the lung cancer.

[0257] The term “effective amount” of a target RNA or an inhibitor of target RNA expression or activity is an amount sufficient to inhibit proliferation of cancer cells in an individual suffering from lung cancer. An effective amount of a compound for use in the pharmaceutical compositions disclosed herein is readily determined by a person skilled in the art, e.g., by taking into account factors such as the size and weight of the individual to be treated, the stage of the disease, the age, health and gender of the individual, the route of administration and whether administration is localized or systemic.

[0258] In addition to an isolated target RNA or a target RNA inhibitor, or a pharmaceutically acceptable salt thereof, the pharmaceutical compositions disclosed herein further comprise a pharmaceutically acceptable carrier, including but not limited to, water, buffered water, normal saline, 0.4% saline, 0.3% glycine, and hyaluronic acid. In some embodiments, the pharmaceutical compositions comprise an isolated target RNA or a target RNA expression inhibitor that is encapsulated, e.g., in liposomes. In some embodiments, the pharmaceutical compositions comprise an isolated target RNA or a target RNA expression inhibitor that is resistant to nucleases, e.g., by modification of the nucleic acid backbone as described above in Section 4.1.5. In some embodiments, the pharmaceutical compositions further comprise pharmaceutically acceptable excipients such as stabilizers, antioxidants, osmolality adjusting agents and buffers. In some embodiments, the pharmaceutical compositions further comprise at least one chemotherapeutic agent, including but not limited to, alkylating agents, anti-metabolites, epipodophyllotoxins, anthracyclines, vinca alkaloids, plant alkaloids and terpenoids, monoclonal antibodies, taxanes, topoisomerase inhibitors, platinum compounds, protein kinase inhibitors, and antisense nucleic acids.

[0259] Pharmaceutical compositions can take the form of solutions, suspensions, emulsions, tablets, pills, pellets, capsules, capsules containing liquids, powders, sustained-release formulations, suppositories, emulsions, aerosols, sprays, suspensions, or any other form suitable for use. Methods of administration include, but are not limited to, oral, parenteral, intravenous, oral, and by inhalation.

[0260] The following examples are for illustration purposes only, and are not meant to be limiting in any way.

### 5. EXAMPLES

### 5.1 Example 1

### MicroRNAs from Primary Lung Tumors

[0261] Using microarray analysis, distinct microRNAs were demonstrated to be deregulated (e.g., either over-expressed or under-expressed) in primary lung tumors.

[0262] Total RNA was extracted from each of the primary tumors in Table 10 by preparation from frozen tissue samples as described below.

RNA Preparation from Frozen Tissue Samples

[0263] Archived or freshly snap-frozen tumor specimens were homogenized by mortar and pestle in TRIzol® Reagent, Invitrogen (Carlsbad, Calif.) and RNA was further extracted according to the manufacturer's protocol. All RNA samples were diluted in RNase-free water and stored at −80° C.

TABLE 10

| Tumor | | | Smoking Risk | | |
|---|---|---|---|---|---|
| designation | Sex | Age | Factor | Cancer type | Stage |
| Adk-1 | M | 59 | Smoker | Non Squamous, | YT2N2 |
| | | | | adenocarcinoma | |
| Adk-2 | M | 67 | Smoker | Non Squamous, | PT2N0 |
| | | | | adenocarcinoma | |
| Adk-3 | M | 78 | na | Non Squamous, | PT1N0 |
| | | | | adenocarcinoma | |
| Adk-8 | F | 51 | na | Non Squamous, | PT3N0 |
| | | | | adenocarcinoma | |
| Adk-9 | M | 55 | Smoker | Non Squamous, | PT1N0 |
| | | | | adenocarcinoma | |
| Adk-10 | M | 49 | Smoker | Non Squamous, | PT3N0 |
| | | | | adenocarcinoma | |
| Adk-11 | M | 73 | na | Non Squamous, | PT1N0 |
| | | | | adenocarcinoma | |
| Epi-4 | M | 78 | Smoker | Squamous, Epidermoid | PT2NX |
| | | | | carcinoma | |
| Epi-5 | M | 78 | Smoker | Squamous, Epidermoid | PT2NX |
| | | | | carcinoma | |
| Epi-7 | F | 84 | Non-smoker | Squamous, Epidermoid | PT2NX |
| | | | | carcinoma | |
| Normal-lung_1 | M | 81 | na | Normal tissue from patient | PT2N0 |
| Normal-lung_2 | na | na | na | Normal tissue from Ambion | na |

[0264] Epi4, Epi7, Epi5, Adk1, Adk3, Adk11, Adk8, Adk9 and Adk2 identify primary tumors resected from 10 patients. Epi (epidermoid) is squamous cell carcinoma, while Adk (adenocarcinoma) is non-squamous cell carcinoma.

[0265] In Table 10, above, “na” indicates that the information was not available. “Y” in the staging column indicates that the patient was treated before surgical resection. “P” indicates that the patient was not treated before surgical resection.

[0266] Staging is according to the “TNM” staging system for NSCLC. “T” categories for NSCLC indicate the following: (a) Ti indicates that the tumor is no larger than 3 centimeters across, has not reached the membranes that surround the lungs, and does not affect the main branches of the bronchi; (b) T2 tumors possess one or more of the following features: (i) larger than 3 centimeters across; (ii) involves a main bronchus, but is not closer than 2 cm to the carina (the point where the windpipe splits into the left and right main bronchi); (iii) has grown into the membranes that surround the lungs; or (iv) partially clogs the airways, but has not caused the entire lung to collapse or develop pneumonia; (c) T3 indicates a tumor of any size having one or more of the following features: (i) tumor has grown into the chest wall, the diaphragm, the membranes surrounding the space between the two lungs, or membranes of the sac surrounding the heart; (ii) tumor invades a main bronchus and is closer than 2 cm to the carina, but it does not involve the carina itself; or (iii) tumor has grown into the airways enough to cause an entire lung to collapse or to cause pneumonia in the entire lung. The “N” number indicates involvement of the lymph nodes as follows: (a) NO indicates that the cancer has not spread to nearby lymph nodes; (b) N2 indicates spread to lymph nodes around the carina or in the space behind the breastbone and in front of the mediastinum. Affected lymph nodes are on the same side as the primary tumor; and (c) NX indicates that nearby lymph nodes could not be accessed.

[0267] Total RNA from normal lung tissue resected from a patient (in this case from a location in the lung as distal as possible from the tumor) and normal lung tissue from a location adjacent to a lung tumor (Ambion) were used as the control.

### Total RNA Preparation and Analysis

[0268] Total RNA was isolated by using standard TRIzol® protocol (Invitrogen). Cells from two confluent 75 cm² flasks were harvested (=approx 10⁷ cells). Total RNA was prepared using TRIzol® Reagent, Invitrogen (Carlsbad, Calif.) according to the manufacturer's protocol. All RNA samples were diluted in RNase-free water and stored in −80° C. (−112° F.).

[0269] RNA quality was assessed by calculating OD 260/280 ratios. The quality of all RNA samples was high as assessed using an Agilent Bioanalyser 2100, as exemplified by the electropherogram shown in FIG. 1 obtained for total RNA from A549 human adenocarcinoma cell line. Similar electropherograms were obtained for total RNA from the other primary tumor samples as well.

### MicroRNA Purification

[0270] MicroRNA purification was performed using a Flash PAGE Fractionator (Ambion). The Ambion gel purification protocol enriches for small RNAs less than 40 nucleotides (nt) long, including microRNAs. Briefly, a total RNA sample was loaded onto a pre-cast gel using the Flash PAGE Fractionator. The total RNA fraction smaller than 40 nt (the “microRNA fraction”) was recovered after gel migration and resuspended into nuclease free water.

### Microarray Analysis

[0271] Probe Design and Spotting

[0272] The oligonucleotide probes used for microarray preparation had the configuration 5′—NH₂—(C)₆-(spacer)-(oligomer probe sequence)-3′. The 5′-amino group allowed chemical bonding onto the array support. Each also included an identical spacer sequence of 15 nt, as shown below, to prevent non-specific interactions of the oligonucleotide probes with the array support:

(SEQ ID NO: 1044)

5′AminoC6-TTGTAATACGACTCA-Oligo probe sequence

Probe sequences given in Table 1 and Table 2 omit the linker.

[0273] The probes were synthesized according to standard protocols by Eurofins MWG Operon (Ebersberg, Germany). Nexterion (Schott) microarray glass slides were used as the solid support for the microarray.

[0274] The oligonucleotide probe concentration used for the spotting was 25 μmol. The probes were spotted in duplicate using the Nexterion spotting buffer provided with the array glass support by Schott with 1% SDS (sodium dodecyl sulfate) added to allow larger spot sizes (e.g., 100-150 microns compared to 70-100 microns without SDS). The spotter used was the QArray mini (Genetix) equipped with Stealth SMP3 pins (Telechem). After deposition of one series of spots, the spotting needle was washed 5 times with 60 mM NaOH before spotting the next series of probes. Each slide is designed with 32 blocks of spotted probes, with each block being a 20×20 square of spotted probes. Each probe was spotted in duplicate. Spotted glass slides were stored at 4° C. until use.

### MicroRNA Labelling

[0275] The labelling of the microRNA fraction was adapted from a published protocol developed at EMBL (Heidelburg, Germany) by the European Molecular Biology Group (Castoldi et al., “A sensitive array for microRNA expression profiling (miChip) based on locked nucleic acids (LNA),” RNA 2006 May; 12(5):913-20. Epub 2006 Mar. 15, incorporated herein by reference in its entirety). Briefly, the microRNA fraction was incubated for 6 hours at 4° C. with a mixture containing 10 μM of dye-labelled tetra-nucleotide (5′-rUrUrUrU-Cy5-3′) (or alternatively, 5′-rUrUrUrU-Cy3-3′) (Biospring, Germany) in Ambion buffer diluted to 1× with RNase free water, 8% polyethylene glycol (PEG), 2 mM adenosine triphosphate (ATP), and T4 RNA ligase (0.7 U/μl). The labelling reaction was run by heating the mixture for 15 minutes at 65° C. This procedure ligated the poly-U dye-labelled tail to the 3′ end of all the microRNAs. Labelled samples were stored at 4° C. before hybridization.

### Array Hybridization

[0276] The labelled microRNA fraction was hybridized to the spotted arrays using a Discovery hybridization station (Ventana, Tucson, Ariz.). Briefly, 2 mL of a mixture of 1% BSA, 2×SSC, and 0.2% SDS was incubated with the chips for 30 min at 42° C. Then the chips were washed once using EZ Prep buffer (Ventana) and then three more times with Ribowash (Ventana). Next, 20 μl of the labelled microRNA mixture and 180 μl of ChipHybe Reagent (Ventana) were added to the array. The arrays were heated for 6 minutes at 37° C., then were incubated at 42° C. for 8 hours, after which the heating was stopped. The chips were washed once with Ribowash (Ventana) and then heated for 2 minutes at 37° C. The chips were washed again with Ribowash (Ventana) with one drop of CheapClean (Ventana) added, and incubated for 2 minutes at 37° C. The chips were washed two more times using Ribowash (Ventana). The chips were stored dry overnight. On the following day, the final washes were done according to Ventana's instructions for the Discovery hybridization station. The slides were washed twice with 2×SSC+0.2×SDS buffer and then one more time with 0.1×SSC. All the slides were dried using a speed centrifuge from Arrayit (TeleChem International, Sunnyvale, Calif.) at room temperature and kept in the dark before scanning

[0277] As an alternative to the ChipHybe Reagent solution (solution 1), the following solution may be used for array hybridization (solution 2) to form probe:target RNA hybrids by mixing 2 parts of the 1.5×TMAC Hybridization Solution to 1 part (v:v) sample, so that the final component concentrations are 3M TMAC, 0.10% Sarkosyl, 50 mM Tris, and 4 mM EDTA, and incubating on the array at 42° C. for 8 hours:

1.5X TMAC Hybridization Solution

| Reagent | Catalog Number | Final Conc | | Amount/250 mL | |
|---|---|---|---|---|---|
| 5 M TMAC* | Sigma T3411 | 4.5 | M | 225 | mL |
| 20% Sarkosyl | — | 0.15% | | 1.88 | mL |
| 1 M Tris-HCl, | Sigma T3038 | 75 | mM | 18.75 | mL |
| pH 8.0 | | | | | |
| 0.5 M EDTA, | Invitrogen | 6 | mM | 3.0 | mL |
| pH 8.0 | 15575-020 | | | | |

| | | | | |
|---|---|---|---|---|
| H₂O | — | — | 1.37 | mL |

*TMAC is tetramethyl ammonium chloride

[0278] The number of technical replicates hybridized for each biological sample is shown below in Table 11.

TABLE 11

| | | | Squamous cell | | | | | | | | | |
|---|---|---|---|---|---|---|---|---|---|---|---|---|
| | Normal | | carcinoma | | | Non-squamous carcinoma | | | | | | |
| Samples | Lung1 | Lung2 | Epi4 | Epi5 | Epi7 | Adk1 | Adk2 | Adk3 | Adk8 | Adk9 | Adk10 | Adk11 |
| G2 | 3 | 4 | 4 | 1 | 2 | 3 | | 2 | 3 | | 5 | 2 |
| G3 | | | 2 | | | | 2 | | | 1 | 2 | |

### Array Image Acquisition

[0279] The arrays were scanned using an Axon™ scanner (Molecular Devices, Sunnyvale, Calif.) and their Genepix™ software. The image was formatted in tif format, defined by an image color depth of 16 bits/pixel (1600*1600). At such setting, pixels can assume intensity values ranging from 0 to 65,535. Pixels exhibiting the maximum intensity value are “saturated” and were assigned the value of 65,535. The resolution of the array scan was set at 10 μm/pixel. For hybridization experiments using different fluorescent dyes (e.g., Cy5 and Cy3) the photomultiplier tube (PMT) was adjusted to the higher intensity spot (Cy3 is scanned at lower PMT settings than Cy5).

### Array Image Analysis

[0280] The PMT of the laser scanner digitized the captured fluorescence intensity for each given “point” of a slide and stored the numerical value as a pixel corresponding to that point. A picture composed of such pixels was then analyzed.

[0281] The first task for image analysis was to detect the spot position, using a process called segmentation. Spots were segmented by circles of adaptable or fixed radius. To be reliably segmented and quantified, the spot diameter was required to be more than 5-6 pixels. Before segmentation an indexing grid was provided giving the approximate positions of the spots. The segmentation itself detected the limits of spots near the grid circles. Briefly, the Genepix software assigns a circle to each spot on the array (segmentation). The segmentation had to be conducted in a somewhat flexible way due to spotting imperfections and/or support deformation, as the spots were almost never on a perfectly rectangular grid.

[0282] After segmentation by the software, the circles were modified manually and adjusted onto the spots until all the spots on the array were clearly identified. At this stage, if the array presented high background noise preventing real spots from being distinguished from the background, the array was rejected for further analysis.

[0283] The second task of image analysis was to quantify spots and export the data into a result file. This was a relatively easy and well-defined task once the spots were located on the image. The statistical approach used most frequently to quantify spot intensity was the mean or median of pixels belonging to a spot. The median approach was more robust than the mean value in the presence of outlier pixels. In practice, however, there was little difference in the results obtained using mean or median.

### Array Data Analysis

[0284] All the array data were analysed using the R bioconductor package (“Bioconductor: open software development for computational biology and bioinformatics,” Genome Biol. 2004; 5(10):R80. Epub 2004 Sep. 15, which is incorporated herein by reference in its entirety).

[0285] Array data were first tested for quality by comparing the spot intensities for the internal controls. (Table 12) One internal control (SEQ ID NO: 1046) was used as a labelling control (this synthetic RNA is added to the purified microRNA fraction before labelling), and 7 other internal controls (SEQ ID NOs: 1047 to 1052 and 1045) were used for the normalization of the data (these synthetic RNA controls are added to the total RNA fraction before hybridization at 520 fmol each/array).

TABLE 12
Internal controls added to total RNA
or microRNA fraction

| | |
|---|---|
| CGCGCGUCGCUUUAUCUACUGU | SEQ ID NO: 1046; CTL30_COMP |
| UUAUCGUUCGAUAAGUCGCGUU | SEQ ID NO: 1047; CTL11_COMP |
| GAAGUUACUAUGUAGGCAACCU | SEQ ID NO: 1048; CTL23_COMP |
| CGCGGGACUAAUUGUUACCGGG | SEQ ID NO: 1049; CTL26_COMP |
| UCGCGUCGAACUCCGCAACCGA | SEQ ID NO: 1050; CTL29_COMP |
| ACCGAACGCCGUACCCAUCGGG | SEQ ID NO: 1051; CTL31_COMP |
| CGAGGGUAACGACUCUCGUGUC | SEQ ID NO: 1052; CTL36_COMP |
| GCGUACCGACGCGUAGACGGAC | SEQ ID NO: 1045; CTL13_COMP |

TABLE 13

Probes for hybridization of control sequences
in microarray experiments

| | |
|---|---|
| Sequence (5′-3′) | Sequence identification number |

| | |
|---|---|
| TTGTAATACGACTCAACAGTAGATAAAGCGACGCGCG | SEQ ID NO: 1054; CTL30 |
| TTGTAATACGACTCAAACGCGACTTATCGAACGATAA | SEQ ID NO: 1055; CTL11 |
| TTGTAATACGACTCAAGGTTGCCTACATAGTAACTTC | SEQ ID NO: 1056; CTL23 |
| TTGTAATACGACTCACCCGGTAACAATTAGTCCCGCG | SEQ ID NO: 1057; CTL26 |
| TTGTAATACGACTCATCGGTTGCGGAGTTCGACGCGA | SEQ ID NO: 1058; CTL29 |
| TTGTAATACGACTCACCCGATGGGTACGGCGTTCGGT | SEQ ID NO: 1059; CTL31 |
| TTGTAATACGACTCAGACACGAGAGTCGTTACCCTCG | SEQ ID NO: 1060; CTL36 |
| TTGTAATACGACTCACCCGGTAACAATTAGACCCGCG | SEQ ID NO: 1061; CTL26_MUT |
| TTGTAATACGACTCAGTCCGTCTACGCGTCGGTACGC | SEQ ID NO: 1062; CTL13 |
| TTGTAATACGACTCAGGCCGTCTACGCGTCGGTACGC | SEQ ID NO: 1053; CTL13_MUT |

[0286] All sequences for which the intensity of the spot was higher than the mean local background intensity plus 1.5 times its standard deviation were categorized as expressed microRNAs. The following criteria were required to be met in order consider the array intensity data valid for further analysis:
[0287] 1. Specificity of the hybridization controls had to be within acceptance criteria (e.g. CTL26 vs. its corresponding single base mutant, CTL26_MUT, or CTL13 vs. its corresponding single base mutant, CTL13_MUT).
[0288] 2. Approximate equality of the signal intensity of the replicates of the positive controls
[0289] 3. Approximate equality between median block signal intensities based on the positive controls for each block
[0290] 4. Approximate equality between median array signals based on all sequences detected
[0291] 5. Signal intensity for the purification and labelling control (CTL30).

[0292] Statistical normalization of the data was done by computing the Log 2ratio where the Log 2ratio equals average intensity signal of the duplicated spots/median intensity of all positives controls for the block. The normalization was done per block to avoid non-homogenous labelling of all blocks of the array. This block-by-block normalization has been shown to be more efficient then using overall normalization of the slide. The obtained values are Log 2 values.

[0293] The intensities of the spots for each oligonucleotide probe were compared in the sample from the primary lung tumors versus normal lung tissue, resulting in an evaluation of the relative expression for each microRNA.

[0294] The expression fold-change corresponds to 2^{(Log 2ratio)}. The Log 2ratio is the ratio between the two conditions compared, or log 2(Xcell-line/Xnormal), which is the same as (log 2Xcell-line−log 2Xnormal), where X is the measured intensity value. In cases where there was no signal from the “normal” condition, the lowest measured intensity value in the experiment was used as the baseline from which a fold-change expression value was calculated. A fold-change value of less than zero corresponds to a down-regulation of (1/fold-change) times.

[0295] Data are tabulated in Table 1. The numerical values set forth in Table 1 indicate the fold-change calculated by comparing the signal intensity measured for hybridization to a particular probe in each tumor cell sample with the signal intensity measured for hybridization to the same probe in the control sample (NHBE cells). When the signal detected for hybridization to a particular probe in both the control sample and the tumor cell sample was below the threshold value, the indication “nd” is given in the Table and no fold-change was calculated. Likewise, when hybridization to a particular array probe was detected in the control sample but not in a tumor cell sample, the fold-change calculation is preceded by “nd” in the Table. When no signal was detected in the control sample, the threshold value was retained for the fold-change calculation. This results in an underestimation of the fold-change in the tumor cell sample as compared to the control sample, which is indicated respectively by a “>” or “<” sign in Table 1 for up-regulation and down-regulation of a target RNA.

### 5.2 Example 2

### Analysis of Target RNA from Lung Cancer Cell Lines

[0296] Cell lines

[0297] Total RNA was prepared from three different lung cell lines that are commonly used in studies of lung cancer. The RNA was used for target RNA array profiling.

[0298] As set forth in Table 14 below, cell lines were selected for diversity, deriving from adenocarcinomas, squamous cell carcinomas and large cell carcinomas. All cell lines were purchased from LGC Promochem (ATCC) and cultured according to ATCC's guidelines.

TABLE 14

| Cell Line | ATCC Number | Cancer type |
|---|---|---|
| NHBE | CC-2540 | Normal bronchial epithelial |
| | | cells |
| BEA2B | CRL-9609 | Immortalized bronchial |
| | | epithelial cells - normal |
| | | phenotype |
| A549 | CCL-185 | Adenocarcinoma |
| H1703 | CRL-5889 | Adenocarcinoma |
| H460 | HTB-177 | Carcinoma |
| | | (big neuroendocrine cells) |

[0299] Microarray data acquisition and analysis were conducted as described in Example 1.

[0300] Total RNA from normal bronchial epithelial cells (NHBE, ATCC no. CC-2540) was used as a control.

[0301] Data are tabulated in Table 2. The tabulated values correspond to the fold-changes calculated by comparing the signal intensity measured for hybridization to a particular array probe in a primary tumor sample with the mean signal intensity for hybridization to the same probe in the control samples. When the signal was below the threshold value for both the control sample and the primary tumor sample, no fold-change was calculated (indicated by “nd” in Table 2). When hybridization to a particular probe was detected in the control sample, but not in a primary tumor sample, the fold-change calculation is preceded by “nd”. When no signal was detected for hybridization to an array probe in the control samples, the threshold value was retained for the fold-change calculation, which resulted in an underestimation of the fold-change in the primary tumor sample as compared to the control sample. This is indicated in Table 2 respectively by a “>” or “<” sign for up-regulated and down-regulated target RNAs.

### 5.3 Example 3

### Analysis of Target RNA on Luminex Platform

[0302] The Luminex technology (Luminex Corp., Austin, Tex.) is based on liquid phase hybridization to probe-labelled beads, followed by flow cytometry detection of beads with differing ratios of fluorescent dyes. Beads with up to 100 different dye ratios are available, making it possible to interrogate a single sample for up to 100 analytes simultaneously.

### Coupling of Probes to Luminex Beads

[0303] Aliquots of each 5′-amino-modified probe having sequences as set forth in Example 1 and Table 1 are prepared at a concentration of 0.1 nmol/μL in molecular biology grade water. The probes are coupled to the beads using carbodiimide chemistry according to the manufacturer's protocol (Luminex bead coupling protocol). The probe-coupled beads are stored at 4° C.

### Total RNA Preparation for Luminex Analysis

[0304] Fifty fmoles of each of 7 internal controls (the same synthetic RNAs used for the array controls) are added to the total RNA fraction isolated from the biological samples. Prior to hybridization with Luminex beads, the total RNA preparation is treated to avoid the formation of dendrimers, which result from the circularization of a single RNA molecule, or concatenation to another RNA molecule. To avoid the formation of dendrimers, the RNA is pre-treated with calf intestinal phosphatase (CIP) to remove the 5′-phosphate groups. The CIP reagent can be obtained from Invitrogen (Carlsbad, Calif.) and the CIP reaction is run according to the manufacturer's protocol.

### Bead Labelling and Hybridization

[0305] After CIP treatment, the total RNA fraction is then labelled with biotin using the Vantage microRNA Labelling Kit (Marligen). The labelled fraction is hybridized to the Luminex beads using the Marligen protocol. Briefly, the oligonucleotide beads are mixed with the Marligen hybridization solution (1.5×TMAC) and the labelled total RNA. The hybridization is performed at 60° C. for an hour in the dark. After hybridization, the beads are washed using the Luminex standard 6×SSPET wash buffer (sodium phosphate, sodium chloride, EDTA, Triton X-100, pH 7.4).

### Detection of Bead Hybridization

[0306] The detection of the Luminex beads is done using streptavidin phycoerythrin (SAPE) (Europa Bioproducts, Cambridge, UK). The SAPE is added to the washed beads according to the Luminex protocol. The beads are then read using the Luminex IS-200 instrument using the high gain setting for better resolution

### Data Acquisition and Analysis

[0307] The Luminex IS-200 reads at least 25 beads of each dye-ratio in the reaction mix. Each dye-ratio bead corresponds to a particular probe sequence, and the intensity value is returned as an average value of all read beads. The mean fluorescence intensity (MFI) data is normalized using synthetic RNA controls, and fold changes between normal and diseased samples are computed using the Bioplex software (Bio-Rad, Hercules, Calif.) and the R bioconductor package (Bioconductor: open software development for computational biology and bioinformatics, Genome Biol. 2004; 5(10):R80. Epub 2004 Sep. 15).

### 5.4 Example 4

### Analysis of Target RNA from Additional Primary Lung Tumors

[0308] Three of the primary lung tumors analyzed in Example 1 were included in this analysis (Adk-9, Adk-10, and Epi-4). The microRNA fractions isolated from those tumors in Example 1 were used in the microarray experiment described below.

### Patient Cohort

[0309] In addition to the three tumors listed above (and included in Table 15 in the first three lines), fifteen patients diagnosed with lung cancer were included in the cohort, nine men and six women. Normal tissue from an additional patient (Ksarc-17) was also included in the study. Because squamous cell lung cancer and non-squamous cell lung cancer are two of the most frequent lung cancer types (more than 70% of all lung cancers), four patients diagnosed with squamous cell carcinoma (Kmalp-21, Kmalp-25, Epi-42, and Kmalp-44) and seven patients diagnosed with non-squamous cell carcinoma (Adk-40, Adk-41, Adk-48, Adk-49, Adk-15, Adk-23, and Adk-29) were included, in addition to the previous squamous cell carcinoma (Epi-4) and non-squamous cell carcinoma (Adk-9, and Adk-10) patients. In addition, one patient diagnosed with a carcinoid (Car-13), one diagnosed with a carcinoma sarcomatoid (Ksarc-19), one diagnosed with a small cell lung cancer (Scc-27), and one diagnosed with a large cell neuroendocrine cancer (Lcnec-31) were also selected. Table 15 shows a list of the patients and various clinical characteristics of each patient.

TABLE 15
Clinical characteristics of patients in cohort.

| | | | | Birth | | | |
|---|---|---|---|---|---|---|---|
| | | | | year | | | |
| Patient | | Tissue | | or | Smoking | TNM | Stage |
| ID | histology | collected | gender | Age | history | staging | group |
| Adk-9 | adenocarcinoma | PT | M | 1953 | 40 smokes/day | T1N0M0 | IA |
| Adk-10 | adenocarcinoma | PT | M | 1959 | 25 smokes/day | T3N0M0 | IIB |
| Epi-4 | sqamous | PT | M | 1930 | 30 smokes/day | T2NxM0 | IIIA |
| Adk-29 | adenocarcinome | PT & DNT | M | 1932 | ? smokes/day | T4N2M1 | IV |
| Adk-15 | adenocarcinoma | PT & DNT | M | 1947 | ? smokes/day | T2N0M0 | IB |
| Adk-23 | adenocarcinome | PT & DNT | F | 1971 | 0 | T3N0M0 | IIB |
| Ksarc-19 | carcinome | PT & DNT | M | 1949 | 0 | T4N1M0 | IIIB |
| | sarcomatoide | | | | | | |
| Kmalp- | Epidermoide | PT & DNT | M | 1928 | 0 | T2N0M0 | IB |
| 25 | | | | | | | |
| Kmalp- | Epidermoide | PT & DNT | F | 1942 | 0 | T3N1M0 | IIIA |
| 21 | | | | | | | |
| Car-13 | Carcinoide | PT & DNT | F | 1952 | 0 | T3N1M0 | IIIA |
| Lcnec-31 | neuroendocrine | PT & DNT | M | 1946 | 0 | T3N2M0 | IIIA |
| | GC | | | | | | |
| Scc-27 | petites cellules | PT & DNT | F | 1943 | 0 | T2N0M0 | IB |
| Adk-40 | Non Squamous, | PT | M | 76 | NA | T1aN0 | IA |
| | adenocarcinoma | | | | | | |
| Adk-41 | Non Squamous, | PT | F | 61 | Smoker | T2N0M0 | IB |
| | adenocarcinoma | | | | | | |
| Adk-48 | Non Squamous, | PT | F | 56 | NA | T1bN0M0 | IA |
| | adenocarcinoma | | | | | | |
| Adk-49 | Non Squamous, | PT | M | 53 | NA | T3N2 | IIIA |
| | adenocarcinoma | | | | | | |
| Epi-42 | Squamous, | PT | M | 59 | NA | T3N1M0 | IIIA |
| | Epidermoid | | | | | | |
| | carcinoma | | | | | | |
| Kmalp- | Squamous, | PT | M | na | NA | T2bN0 | IB |
| 44 | Epidermoid | | | | | | |
| | carcinoma | | | | | | |
| Ksarc-17 | Carcinome | DNT | M | 53 | NA | T2N0M0 | IB |
| | Sarcomatoide | | | | | | |

PT = Primary Tumor
DNT = Distal Normal Tissue
NA = information not available

[0310] Five of the patients had very aggressive forms of lung cancer, Ksarc-19 (carcinoma sarcomatoide), Adk-9, Adk-10, Adk-29 (all adenocarcinoma), and Lcnec-31. Patient Ksarc-19 relapsed one month after surgery and died six months later. Patient Car-13 (carcinoide) had a slow growing form of lung cancer.

[0311] The primary tumors only were collected from six of the patients (as well as the four previous patients, for a total of 10 patients), while the primary tumor and distal normal tissue were collected from nine of the patients. Distal normal tissue only was used from one of the patients (Ksarc-17). The relative amount of tumor cells versus normal cells in primary tumors was determined to be between 90% and 100% for all patients. The distal normal tissue was collected from a location as far as possible from the primary tumor, and did not contain detectable tumor cells.

### Tissue Samples

[0312] Archived or freshly snap-frozen specimens from lung primary tumors were used. Tissue samples were homogenized by mortar and pestle in TRIzol® Reagent (Invitrogen; Carlsbad, Calif.) and RNA was extracted according to manufacturer's protocol. RNA samples were diluted in RNase-free water and stored in −80° C. (−112° F.).

### MicroRNA Preparation:

[0313] All samples were enriched for the microRNA fraction using a Flash PAGE Fractionator (Ambion). Briefly, a total RNA sample was loaded onto a pre-cast gel using the Flash PAGE Fractionator. The total RNA fraction smaller than 40 nt (the “microRNA fraction”) was recovered after gel migration and resuspended into nuclease free water.

### Microarray Analysis

### Probe Design and Spotting

[0314] The polynucleotide probes used for microarray preparation had the configuration 5′-NH₂—(C)₆-(spacer)-(oligomer probe sequence)-3′. The 5′-amino group allowed chemical bonding onto the array support. Each also included an identical spacer sequence of 15 nt, as shown below, to prevent non-specific interactions of the polynucleotide probes with the array support:

(SEQ ID NO: 1044)

5′AminoC6-TTGTAATACGACTCA-Oligo probe sequence.

Probe sequences given in the Tables herein omit the linker.

[0315] The probes were synthesized according to standard protocols by Eurofins MWG Operon (Ebersberg, Germany). Nexterion (Schott) microarray glass slides were used as the solid support for the microarray.

[0316] The polynucleotide probe concentration used for the spotting was 25 μmol. The probes were spotted in duplicate using the Nexterion spotting buffer provided with the array glass support by Schott with 1% SDS (sodium dodecyl sulfate) added to allow larger spot sizes (e.g., 100-150 microns compared to 70-100 microns without SDS). The spotter used was the QArray mini (Genetix) equipped with Stealth SMP3 pins (Telechem). After deposition of one series of spots, the spotting needle was washed 5 times with 60 mM NaOH before spotting the next series of probes. Each slide is designed with 48 blocks of spotted probes, with each block being a 20×18 square of spotted probes. Each probe was spotted in duplicate. Spotted glass slides were stored at 4° C. until use.

### MicroRNA Labelling

[0317] The labelling of the microRNA fraction was adapted from a published protocol developed at EMBL (Heidelburg, Germany) by the European Molecular Biology Group (Castoldi et al., “A sensitive array for microRNA expression profiling (miChip) based on locked nucleic acids (LNA),” RNA 2006 May; 12(5):913-20. Epub 2006 Mar. 15, incorporated herein by reference in its entirety). Briefly, the microRNA fraction was incubated for 6 hours at 4° C. with a mixture containing 10 μM of dye-labelled tetra-nucleotide (5′-rUrUrUrU-Cy5-3′) (or alternatively, 5′-rUrUrUrU-Cy3-3′) (Biospring, Germany) in Ambion buffer diluted to 1× with RNase free water, 8% polyethylene glycol (PEG), 2 mM adenosine triphosphate (ATP), and T4 RNA ligase (0.7 U/μl). The labelling reaction was run by heating the mixture for 15 minutes at 65° C. This procedure ligated the poly-U dye-labelled tail to the 3′ end of all the microRNAs. Labelled samples were stored at 4° C. before hybridization.

### Array Hybridization

[0318] Table 16 shows the number of array replicates carried out for each tumor sample.

TABLE 16
Number of Replicates for Sample

| Sample | Tumor type | Number replicates |
|---|---|---|
| Adk-9 | Non-squamous | 1 |
| Adk-10 | Non-squamous | 2 |
| Epi-4 | Squamous | 2 |
| Adk-29 | Non-squamous | 3 |
| Adk-15 | Non-squamous | 3 |
| Adk-23 | Non-squamous | 3 |
| Ksarc-19 | Squamous | 2 |
| Kmalp-25 | Squamous | 1 |
| Kmalp-21 | Squamous | 3 |
| Car-13 | Carcinoid | 3 |
| Lcnec-31 | Large cell neuroendocrine | 2 |
| Scc-27 | Small cell | 2 |
| Adk-40 | Non-squamous | 2 |
| Adk-41 | Non-squamous | 3 |
| Adk-48 | Non-squamous | 2 |
| Adk-49 | Non-squamous | 3 |
| Epi-42 | Squamous | 3 |
| Kmalp-44 | Squamous | 3 |
| Ksarc-17 | Normal | 3 |
| Adk-29 | Normal | 1 |
| Adk-15 | Normal | 2 |
| Adk-23 | Normal | 3 |
| Ksarc-19 | Normal | 1 |
| Kmalp-25 | Normal | 1 |
| Kmalp-21 | Normal | 1 |
| Lcnec31 | Normal | 1 |
| Scc27 | Normal | 1 |

[0319] The labelled microRNA fraction was hybridized to the spotted arrays using a Discovery hybridization station (Ventana, Tucson, Ariz.). Briefly, 2 mL of a mixture of 1% BSA, 2×SSC, and 0.2% SDS was incubated with the chips for 30 min at 42° C. Then the chips were washed once using EZ Prep buffer (Ventana) and then three more times with Ribowash (Ventana). Next, 20 μl of the labelled microRNA mixture and 180 μl of ChipHybe Reagent (Ventana) were added to the array. The arrays were heated for 6 minutes at 37° C., then were incubated at 42° C. for 8 hours, after which the heating was stopped. The chips were washed once with Ribowash (Ventana) and then heated for 2 minutes at 37° C. The chips were washed again with Ribowash (Ventana) with one drop of CheapClean (Ventana) added, and incubated for 2 minutes at 37° C. The chips were washed two more times using Ribowash (Ventana). The chips were stored dry overnight. On the following day, the final washes were done according to Ventana's instructions for the Discovery hybridization station. The slides were washed twice with 2×SSC+0.2×SDS buffer and then one more time with 0.1×SSC. All the slides were dried using a speed centrifuge from Arrayit (TeleChem International, Sunnyvale, Calif.) at room temperature and kept in the dark before scanning.

### Array Image Acquisition

[0320] The arrays were scanned using an Axon™ scanner (Molecular Devices, Sunnyvale, Calif.) and their Genepix™ software. The image was formatted in tif format, defined by an image color depth of 16 bits/pixel (1600*1600). At such setting, pixels can assume intensity values ranging from 0 to 65,535. Pixels exhibiting the maximum intensity value are “saturated” and were assigned the value of 65,535. The resolution of the array scan was set at 10 μm/pixel. For hybridization experiments using different fluorescent dyes (e.g., Cy5 and Cy3) the photomultiplier tube (PMT) was adjusted to the higher intensity spot (Cy3 is scanned at lower PMT settings than Cy5).

### Array Image Analysis

[0321] The PMT of the laser scanner digitized the captured fluorescence intensity for each given “point” of a slide and stored the numerical value as a pixel corresponding to that point. A picture composed of such pixels was then analyzed.

The first task for image analysis was to detect the spot position, using a process called segmentation. Spots were segmented by circles of adaptable or fixed radius. To be reliably segmented and quantified, the spot diameter was required to be more than 5-6 pixels. Before segmentation an indexing grid was provided giving the approximate positions of the spots. The segmentation itself detected the limits of spots near the grid circles. Briefly, the Genepix software assigns a circle to each spot on the array (segmentation). The segmentation had to be conducted in a somewhat flexible way due to spotting imperfections and/or support deformation, as the spots were almost never on a perfectly rectangular grid.

[0322] After segmentation by the software, the circles were modified manually and adjusted onto the spots until all the spots on the array were clearly identified. At this stage, if the array presented high background noise preventing real spots from being distinguished from the background, the array was rejected for further analysis.

[0323] The second task of image analysis was to quantify spots and export the data into a result file. This was a relatively easy and well-defined task once the spots were located on the image. The statistical approach used most frequently to quantify spot intensity was the mean or median of pixels belonging to a spot. The median approach was more robust than the mean value in the presence of outlier pixels. In practice, however, there was little difference in the results obtained using mean or median.

### Array Data Analysis

[0324] All the array data were analysed using the R bioconductor package (“Bioconductor: open software development for computational biology and bioinformatics,” Genome Biol. 2004; 5(10):R80. Epub 2004 Sep. 15, which is incorporated herein by reference in its entirety).

[0325] Array data were first tested for quality by comparing the spot intensities for the internal controls. One internal control (SEQ ID NO: 1046; Table 17) was used as a labelling control (this synthetic RNA is added to the purified microRNA fraction before labelling), and 6 other internal controls (SEQ ID NOs: 1047 to 1052) were used for the normalization of the data (these synthetic RNA controls are added to the total RNA fraction before hybridization at 520 fmol each/array). The probe sequences that bind to the synthetic RNAs, and a mutant probe sequence, are also shown in Table 17 (SEQ ID NOs: 1054 to 1061).

TABLE 17
Control Sequences used in microarray experiments

| | |
|---|---|
| Sequence (5′-3′) | Sequence identification number |

| | |
|---|---|
| CGCGCGUCGCUUUAUCUACUGU | SEQ ID NO: 1046; CTL30_COMP |
| UUAUCGUUCGAUAAGUCGCGUU | SEQ ID NO: 1047; CTL11_COMP |
| GAAGUUACUAUGUAGGCAACCU | SEQ ID NO: 1048; CTL23_COMP |
| CGCGGGACUAAUUGUUACCGGG | SEQ ID NO: 1049; CTL26_COMP |
| UCGCGUCGAACUCCGCAACCGA | SEQ ID NO: 1050; CTL29_COMP |
| ACCGAACGCCGUACCCAUCGGG | SEQ ID NO: 1051; CTL31_COMP |
| CGAGGGUAACGACUCUCGUGUC | SEQ ID NO: 1052; CTL36_COMP |
| TTGTAATACGACTCAACAGTAGATAAAGCGACGCGCG | SEQ ID NO: 1054; CTL30 |
| TTGTAATACGACTCAAACGCGACTTATCGAACGATAA | SEQ ID NO: 1055; CTL11 |
| TTGTAATACGACTCAAGGTTGCCTACATAGTAACTTC | SEQ ID NO: 1056; CTL23 |
| TTGTAATACGACTCACCCGGTAACAATTAGTCCCGCG | SEQ ID NO: 1057; CTL26 |
| TTGTAATACGACTCATCGGTTGCGGAGTTCGACGCGA | SEQ ID NO: 1058; CTL29 |
| TTGTAATACGACTCACCCGATGGGTACGGCGTTCGGT | SEQ ID NO: 1059; CTL31 |
| TTGTAATACGACTCAGACACGAGAGTCGTTACCCTCG | SEQ ID NO: 1060; CTL36 |
| TTGTAATACGACTCACCCGGTAACAATTAGACCCGCG | SEQ ID NO: 1061; CTL26_MUT |

[0326] All sequences for which the intensity of the spot was higher than the mean local background intensity plus 1.5 times its standard deviation were categorized as expressed microRNAs. The following criteria were required to be met in order consider the array intensity data valid for further analysis:
[0327] 1. Specificity of the hybridization controls had to be within acceptance criteria (e.g. CTL26 vs. its corresponding single base mutant, CTL26_MUT).
[0328] 2. Approximate equality of the signal intensity of the replicates of the positive controls
[0329] 3. Approximate equality between median block signal intensities based on the positive controls for each block
[0330] 4. Approximate equality between median array signals based on all sequences detected
[0331] 5. Signal intensity for the purification and labelling control (CTL30).

[0332] Statistical normalization of the data was done by computing the Log 2ratio where the Log 2ratio equals average intensity signal of the duplicated spots/median intensity of all positives controls for the block. The normalization was done per block to avoid non-homogenous labelling of all blocks of the array. This block-by-block normalization has been shown to be more efficient then using overall normalization of the slide. The obtained values are Log 2 values.

[0333] The intensities of the spots for each polynucleotide probe were compared in the sample from the tumors versus normal tissue, resulting in an evaluation of the relative expression for each microRNA.

[0334] The expression fold-change corresponds to 2^{(Log 2ratio)}. The Log 2ratio is the ratio between the two conditions compared, or log 2(Xcell-line/Xnormal), which is the same as (log 2Xcell-line−log 2Xnormal), where X is the measured intensity value. In cases where there was no signal from the “normal” condition, the lowest measured intensity value in the experiment was used as the baseline from which a fold-change expression value was calculated. A fold-change value of less than zero corresponds to a down-regulation of (1/fold-change) times.

### Results

[0335] The microarray data was analyzed to identify target RNAs that were present at increased levels in more than half of the tumor samples tested. Tables 18 and 19 show the target RNAs, in what percentage of tumor samples they were present in increased levels, and the average fold-increase in those tumor samples in which they were present at increased levels. Data for six of the tumors are shown in Table 18 and data for the remaining 13 tumors are shown in Table 19. Table 18 also shows the probe sequences used to detect the target RNAs.

[0336] The microarray data was further analyzed to identify target RNAs that are present at levels at least 5-fold higher than normal levels in less than 50% of the tumor samples. Tables 20 and 21 show the target RNAs, in what percentage of tumor samples they were present in increased levels, and the average fold-increase in those tumor samples in which they were present at increased levels. Data for six of the tumors are shown in Table 20 and data for the remaining 13 tumors are shown in Table 21. Table 20 also shows the probe sequences used to detect the target RNAs. Finally, Table 22 shows the pre-microRNA sequences and chromosomal location of the pre-microRNA gene for each of the target RNAs in Tables 18 to 21.

[0337] The microarray data was next analyzed to identify target RNAs that were present at least 5-fold decreased levels in more than half of the tumor samples tested. Tables 23 and 24 show the target RNAs, the probe sequences used to detect the target RNAs, and in what percentage of tumor samples they were present in increased levels. Data for six of the tumors are shown in Table 23 and data for the remaining 13 tumors are shown in Table 24. Table 25 shows the pre-microRNA sequences and chromosomal location of the pre-microRNA gene for each of the target RNAs in Tables 23 and 24.

[0338] Finally, Table 9, above, shows target RNAs that were present at higher levels in at least three of the five most aggressive cancers (Ksarc-19, Adk-9, Adk-10, Adk-29, and Lnec-31).

TABLE 18
Target RNAs present at increased levels in at least 50% of tumor samples

| | | | | | | | | | | |
|---|---|---|---|---|---|---|---|---|---|---|
| | | | % | | | | | | | |
| | | SEQ | tumors | Fold | | | | | | |
| | | ID | in- | Chng | | | | | | |
| Gene | Probe sequence | NO | creased | Avg | ADK9 | ADK10 | Adk29 | Adk15 | Adk23 | ADK48 |

| | | | | | | | | | | |
|---|---|---|---|---|---|---|---|---|---|---|
| 10455-L5-1 | TAACAACTGCAATTGCGCCAAACATCCCTCTCC | 1063 | 58 | 6.4 | 2.05 | −3.86 | 1.02 | 5.18 | 2.20 | −3.86 |
| 12947-L5-4 | GTTCCCTTCTCCACAGCCTCTAAATCTCCCATCC | 1064 | 63 | 5.0 | 3.17 | 2.58 | −1.79 | 1.50 | 2.10 | 1.18 |
| | G | | | | | | | | | |
| 13098-L5-1 | TGCCGGGGCGCTGTTGGCGGTTCCTCCGGGGGGT | 1065 | 58 | 4.4 | −2.86 | −2.86 | −2.86 | 1.70 | −1.49 | 5.93 |
| 13122-L5-1 | TTAGGAAATTCCATCTCACCTGCTCCAGTCC | 1066 | 58 | 11.5 | 1.32 | 1.17 | 1.40 | 1.68 | 1.56 | 2.09 |
| 13219-L5-1 | CTCTGACTCCCTCACTCAGTCTCTCTGCTCCAGC | 1067 | 68 | 7.8 | 1.54 | −1.85 | 1.30 | 1.90 | 1.44 | 2.19 |
| 13254-R5-1 | CAATGAACCACTGAACCACTCATGCACTGAACC | 1068 | 63 | 5.0 | 2.21 | 6.72 | 2.48 | 2.40 | 1.52 | 4.02 |
| 13467-L5-1 | GTGACAGTCAGACCCTCCTTGCTCCAAGTCAAA | 1069 | 53 | 17.7 | 2.83 | 3.05 | −1.83 | 3.62 | 2.22 | 1.35 |
| 3923-R5-1 | TCACAAAGGATCTCCTTCATCCCTCTCCAG | 1070 | 58 | 5.3 | −6.96 | −3.57 | −1.11 | 6.71 | 2.53 | 1.59 |
| 4440-L3-2* | TTTGACATTCAGAGCACTGGGCAGAAATCACA | 1071 | 68 | 6.9 | 2.32 | −1.15 | 1.65 | 2.00 | −1.34 | 1.29 |
| 4479-R3-1 | AGCCCCCTGCCCGGAAATTCAAAACAACTGC | 1072 | 53 | 4.3 | 1.27 | 1.08 | −1.38 | 1.11 | 1.55 | 1.75 |
| 5080-R3-1 | CTTGCAAAGGGTCTCCTTCATCCCTCTCCA | 1073 | 68 | 7.2 | 2.60 | −3.84 | 1.58 | 8.83 | 4.24 | −1.12 |
| 6216-L1-1 | GACATTCAGAGCACTGGGCAGAAATCACATG | 1074 | 53 | 8.0 | −1.89 | −1.89 | 1.27 | 2.22 | −1.89 | −1.89 |
| 6235-R5-2 | TCTGCTCCAAAAATCCATTTAATATATTGT | 1075 | 74 | 13.5 | 2.51 | 1.63 | 1.29 | 3.07 | 2.15 | 3.39 |
| 7426-L5-1 | AGACGAACACCTCCTGCTGTGCTTGATTT | 1076 | 63 | 5.1 | 2.59 | −1.45 | 3.22 | 2.64 | 1.21 | −1.45 |
| 7726-R3-2 | CATCCCTCTCCAGAAGAGGAGAAGAGGAAACA | 1077 | 68 | 5.7 | 2.18 | −2.52 | 1.66 | 7.34 | 3.64 | −2.52 |
| 8004-R3-2 | GGAACTGCTTCTCCTTGCTCCAGTCATTGAAG | 1078 | 63 | 11.0 | −5.32 | 1.60 | 1.51 | 1.80 | 1.80 | 2.37 |
| 836-R5-2 | AAATAATCATTCCAAATGGTTCTCCCTGCTAT | 1079 | 79 | 8.7 | 2.22 | 2.37 | 1.49 | 1.80 | 1.93 | 4.05 |
| 9349-R5-2 | GAACACAGTGATGCAGAGGACTTCCTGCTCCA | 1080 | 58 | 24.4 | −1.44 | 4.53 | 1.39 | 7.28 | 1.65 | −1.44 |
| 9594-R5-1 | ACTTAGACTTCCTTCCCACTCCCTGCATCCT | 1081 | 53 | 9.7 | 1.32 | 1.20 | −1.03 | 1.68 | 1.46 | 1.95 |
| miR-200a | ACATCGTTACCAGACAGTGTTA | 1082 | 58 | 6.2 | 4.00 | −1.98 | −1.98 | 1.89 | 2.18 | 4.85 |
| miR-200b | TCATCATTACCAGGCAGTATTA | 1083 | 63 | 4.6 | 3.65 | 1.66 | 1.01 | 2.11 | 2.43 | 2.54 |
| miR-200c | TCCATCATTACCCGGCAGTATTA | 1084 | 68 | 3.6 | 3.05 | 1.53 | −1.02 | 2.00 | 3.71 | 2.39 |
| miR-205 | CAGACTCCGGTGGAATGAAGGA | 1085 | 53 | 21.2 | 6.16 | −1.05 | 7.09 | −1.05 | −1.05 | −1.05 |
| miR-20b | CTACCTGCACTATGAGCACTTTG | 1086 | 53 | 4.8 | 3.82 | 4.97 | −2.24 | 5.93 | 1.03 | 2.35 |
| miR-21 | TCAACATCAGTCTGATAAGCTA | 1087 | 68 | 6.7 | 10.37 | 4.28 | −41.68 | 8.21 | 4.78 | 4.58 |
| miR-298 | TGGGAGAACCTCCCTGCTTCTGCT | 1088 | 68 | 9.8 | 1.96 | 1.55 | 1.87 | 2.23 | 2.18 | 1.30 |
| miR-720 | TGGAGGCCCCAGCGAGA | 1089 | 63 | 4.2 | 9.81 | 4.77 | 3.06 | 2.73 | 5.03 | 4.82 |

TABLE 19
Target RNAs present at increased levels in at least 50%
of tumor samples (con't)

| | % | Fold Chng | | | | | |
|---|---|---|---|---|---|---|---|
| Gene | tumors increased | Avg | Adk40 | Adk41 | Adk49 | Epi42 | Ksarc19 |
| 10455-L5-1 | 58 | 6.4 | −3.86 | −3.86 | 4.88 | 6.15 | 11.22 |
| 12947-L5-4 | 63 | 5.0 | 7.18 | −2.89 | 1.75 | 2.00 | 10.83 |
| 13098-L5-1 | 58 | 4.4 | 6.04 | 2.12 | 4.93 | 7.99 | 2.92 |
| 13122-L5-1 | 58 | 11.5 | −2.23 | −3.30 | 11.06 | 3.00 | 45.07 |
| 13219-L5-1 | 68 | 7.8 | 2.12 | −3.09 | 4.87 | 2.37 | 29.25 |
| 13254-R5-1 | 63 | 5.0 | −5.53 | −5.53 | 4.42 | 3.62 | 1.67 |
| 13467-L5-1 | 53 | 17.7 | −3.86 | −3.86 | 6.58 | −1.54 | 47.10 |
| 3923-R5-1 | 58 | 5.3 | 1.69 | 1.36 | 5.55 | 6.66 | 7.94 |
| 4440-L3-2* | 68 | 6.9 | 14.22 | −2.38 | 4.89 | 5.53 | 4.84 |
| 4479-R3-1 | 53 | 4.3 | −14.83 | 1.85 | −1.15 | 5.75 | 5.60 |
| 5080-R3-1 | 68 | 7.2 | −3.84 | −1.79 | 8.12 | 10.22 | 12.60 |
| 6216-L1-1 | 53 | 8.0 | 15.02 | −1.89 | 2.61 | −1.89 | 5.37 |
| 6235-R5-2 | 74 | 13.5 | −2.30 | −1.76 | 11.09 | 4.52 | 53.43 |
| 7426-L5-1 | 63 | 5.1 | 2.23 | −1.45 | 6.10 | −1.45 | 6.82 |
| 7726-R3-2 | 68 | 5.7 | −2.52 | −2.52 | 8.06 | 9.94 | 8.81 |
| 8004-R3-2 | 63 | 11.0 | −1.69 | −5.32 | 6.36 | 3.58 | 48.62 |
| 836-R5-2 | 79 | 8.7 | 5.02 | −2.64 | 5.63 | 4.02 | 40.75 |
| 9349-R5-2 | 58 | 24.4 | −1.44 | −1.44 | 10.49 | 3.33 | 49.05 |
| 9594-R5-1 | 53 | 9.7 | −6.58 | −6.58 | 4.10 | 2.60 | 30.50 |
| miR-200a | 58 | 6.2 | −1.98 | −1.98 | 5.20 | 4.55 | −1.98 |
| miR-200b | 63 | 4.6 | −1.76 | 2.73 | 3.27 | 2.23 | −4.79 |
| miR-200c | 68 | 3.6 | −8.29 | 2.84 | 1.30 | 2.38 | −8.29 |
| miR-205 | 53 | 21.2 | −1.05 | −1.05 | 8.11 | 13.68 | 3.20 |
| miR-20b | 53 | 4.8 | −2.24 | 2.99 | 8.37 | 4.56 | −1.45 |
| miR-21 | 68 | 6.7 | −6.36 | 6.76 | 17.86 | 8.91 | 3.81 |
| miR-298 | 68 | 9.8 | −2.56 | −2.56 | 6.60 | 5.82 | 36.81 |
| miR-720 | 63 | 4.2 | 6.70 | −1.87 | 2.31 | −1.87 | 2.72 |

| Gene | Kmalp21 | Kmalp25 | EPI-4 | Kmalp44 | Scc27 | Lcnec31 | Car13 |
|---|---|---|---|---|---|---|---|
| 10455-L5-1 | 8.61 | 2.50 | 20.65 | 3.92 | 1.74 | 1.71 | −3.86 |
| 12947-L5-4 | 4.19 | 2.17 | 15.66 | 4.39 | 3.14 | 2.39 | −2.89 |
| 13098-L5-1 | 2.06 | 1.19 | 5.45 | 5.13 | 1.99 | 1.68 | −2.86 |
| 13122-L5-1 | 8.66 | 12.05 | 25.75 | 4.32 | 8.92 | 4.14 | −6.80 |
| 13219-L5-1 | 8.14 | 10.45 | 23.80 | 3.38 | 7.05 | 3.81 | −5.56 |
| 13254-R5-1 | 2.00 | 5.81 | 14.41 | 2.64 | 1.20 | −1.16 | −2.34 |
| 13467-L5-1 | 19.28 | 11.18 | 87.67 | −1.56 | 6.95 | 4.54 | −3.86 |
| 3923-R5-1 | 6.74 | 2.87 | 12.31 | 3.49 | 1.89 | 1.78 | −6.96 |
| 4440-L3-2* | 4.40 | 4.36 | 20.54 | 7.80 | 5.37 | 9.54 | −2.38 |
| 4479-R3-1 | 6.31 | −14.83 | 10.98 | 1.91 | 4.07 | 1.95 | 2.02 |
| 5080-R3-1 | 9.22 | 3.75 | 18.91 | 6.17 | 2.71 | 2.74 | −3.84 |
| 6216-L1-1 | 4.69 | 3.76 | 22.08 | 9.22 | 5.16 | 9.56 | −1.89 |
| 6235-R5-2 | 16.58 | 19.84 | 39.60 | 6.59 | 11.81 | 11.43 | −8.31 |
| 7426-L5-1 | 4.16 | 3.33 | 11.69 | 5.48 | 5.61 | 7.41 | −1.45 |
| 7726-R3-2 | 7.20 | 3.54 | 11.79 | 2.24 | 2.37 | 2.77 | −2.52 |
| 8004-R3-2 | 7.86 | 12.44 | 28.62 | 4.41 | 9.48 | 5.21 | −5.32 |
| 836-R5-2 | 6.59 | 10.21 | 26.72 | 4.38 | 8.08 | 5.16 | −2.64 |
| 9349-R5-2 | 33.90 | 19.27 | 112.09 | 8.79 | 10.70 | 8.85 | −1.44 |
| 9594-R5-1 | 7.67 | 10.86 | 24.28 | 3.32 | 6.82 | 4.54 | −6.58 |
| miR-200a | 1.86 | 1.17 | 3.60 | 3.49 | 4.09 | 3.32 | 26.93 |
| miR-200b | 1.16 | 1.30 | 2.97 | 2.05 | 4.07 | 2.98 | 24.67 |
| miR-200c | −1.03 | 2.11 | 3.38 | 2.05 | 4.09 | 4.89 | 11.97 |
| miR-205 | 27.74 | 56.45 | 30.05 | 46.50 | −1.05 | −1.05 | −1.05 |
| miR-20b | −1.10 | 1.71 | −2.24 | −2.24 | 6.46 | 3.10 | −2.24 |
| miR-21 | −41.68 | 4.64 | 1.92 | 7.46 | 3.38 | 1.19 | 1.41 |
| miR-298 | 9.96 | 10.86 | 31.32 | 5.07 | 7.72 | 4.43 | −2.56 |
| miR-720 | 1.99 | 1.95 | −1.87 | 4.11 | 1.35 | −1.87 | −1.87 |

TABLE 20

Target RNAs present at increased levels in less than 50% of tumor samples, but
with an average increase of at least 5-fold relative to normal levels

| | | | | | | | | | |
|---|---|---|---|---|---|---|---|---|---|
| | | | % | | | | | | |
| | | SEQ | tumors | Fold | | | | | |
| | | ID | in- | Change | | | | | |
| Gene | Probe sequence | NO | creased | Average | ADK9 | ADK10 | Adk29 | Adk15 | Adk23 |

| | | | | | | | | | |
|---|---|---|---|---|---|---|---|---|---|
| 10083-L5-1 | CCCTCTTCCTTTCTACCCCCTCTCTCCACCC | 1090 | 16 | 11.2 | −1.64 | −4.49 | −10.22 | −3.32 | −1.50 |
| 10233-R5-1 | ACCCTCTCCCCTTGGATCTGGAGCAGCAGGCAGTAGA | 1091 | 16 | 13.1 | −1.55 | −7.07 | −4.19 | −1.46 | −1.77 |
| 10335-L5-2 | CCACTCCCCTCCTTTTTAATTAGAAAGCAC | 1092 | 16 | 5.3 | −1.72 | −8.23 | −8.23 | −2.21 | −3.36 |
| 10357-R5-1 | CTCTCCACTGTCTGAATATTCCATGTGTTTGTTTCCC | 1093 | 16 | 6.0 | −1.13 | −1.13 | 1.25 | 2.75 | 1.29 |
| | TAG | | | | | | | | |
| 10520-L5-1 | CAGCATCTCCTTGCTACCTCCTC | 1094 | 26 | 5.9 | −1.42 | −1.42 | −1.42 | −1.42 | 1.14 |
| 10844-R4-1 | AGGGGGTAGCATATTCAGGACTCTACTTTCAAA | 1095 | 26 | 5.4 | −2.58 | −2.58 | −2.58 | 1.36 | −2.00 |
| 11358-R5-2 | ATGGAGGGTGGGAAACTAGGCTGACATGGCTC | 1096 | 21 | 5.3 | −2.77 | −2.77 | −2.77 | 1.77 | −2.18 |
| 11444-L5-3 | GCACTTGTGTTCAGGCACCCACTCCTCCAGCAAAG | 1097 | 21 | 8.8 | −1.20 | −1.20 | −1.20 | −1.20 | −1.20 |
| 11547-R4-1 | GCCCCCTGCTCTGGCTGGTCAAACGGAACCAAGTCCG | 1098 | 16 | 7.6 | −2.09 | −2.09 | −2.09 | −2.09 | −1.66 |
| | TCT | | | | | | | | |
| 11605-L5-4 | TCCCTTCTTTAATTCCCTTCCCCTCAATTCCATAA | 1099 | 26 | 5.0 | −2.54 | −2.54 | −2.54 | −2.54 | −1.37 |
| 11688-R5-3 | GAGACGCCGACTGGCTGAGACTCAAGGCGGGG | 1100 | 32 | 6.0 | −1.33 | −1.33 | −1.33 | −1.33 | −1.33 |
| 12699-R5-2 | AGGGTGGTGGCGGTGGTGGCGGGAACGCTGGGGGG | 1101 | 26 | 6.0 | −1.96 | −1.96 | −1.96 | 1.14 | −1.60 |
| 12707-L5-2 | CATTCTCCTCTGCAATCCAACAACTCTAC | 1102 | 42 | 5.0 | −1.91 | −1.91 | −1.20 | 3.36 | −1.40 |
| 12729-R5-1 | CGACGAAAATGCAATTGTGTGCCTTCTCCCTCC | 1103 | 16 | 11.8 | −1.10 | −5.55 | −5.55 | −1.51 | −2.63 |
| 12730-R5-1 | TTGTGCTCCGCTCTCCGGGAAATGCCATCACTAAT | 1104 | 37 | 7.3 | −3.66 | −3.66 | −2.24 | 1.55 | −2.46 |
| 12888-L5-2 | TTTCCTACATTGTATGGTTCTCCCAGCTCCT | 1105 | 47 | 21.7 | 4.55 | 1.76 | 1.24 | 5.05 | 1.51 |
| 12907-L5-1 | ATGCCCTCTCTACCACGTCCTAGACACTGAGCC | 1106 | 26 | 6.4 | −3.23 | −3.23 | −3.23 | −1.53 | −1.46 |
| 12912-L5-2 | TCAAGTTTTCTGGCACCTTCCACCCACAGAGGCT | 1107 | 37 | 5.3 | −2.26 | −2.26 | −1.29 | 2.16 | −2.26 |
| 12917-R5-2 | GGACCTATGGGCCCTTCCCTTCCCCCAACATTG | 1108 | 47 | 6.0 | 1.03 | −3.76 | −1.02 | 1.54 | 2.26 |
| 12958-R5-1 | TCTTCCCCTGGGTGCATCTATAACGACTACAGA | 1109 | 32 | 5.1 | −1.32 | −1.32 | −1.32 | −1.32 | −1.32 |
| 12974-R5-2 | ACCCTCTGTGCCCCCAAATTCCTAGTCCCTTGGT | 1110 | 21 | 16.1 | −1.94 | −1.94 | −1.94 | −1.94 | −1.30 |
| 12979-R5-2 | TCCAGGTCCTTCCCCAGTAGCTAGATGAAAGAAAA | 1111 | 42 | 16.3 | −1.39 | −1.39 | 1.39 | 6.66 | 4.45 |
| 12992-L5-1 | CATACCTGCTTCCCTCCACCCCCATCTCTA | 1112 | 16 | 6.7 | −9.54 | −2.35 | −9.54 | −2.64 | −3.60 |
| 13001-L5-1 | TTCCTAGATACCACTCCCAGCTCCA | 1113 | 32 | 15.5 | −1.83 | −1.83 | −1.09 | 1.61 | 1.27 |
| 13053-R5-4 | GCCTTCCCTAAGATCAGGCTCATCAGGCAGCCCCA | 1114 | 26 | 5.6 | −1.32 | −1.32 | −1.32 | −1.32 | 1.25 |
| 13070-R5-3 | CTGTCTCCTCTCCCCAGTCCAAAGGACCTAATGC | 1115 | 16 | 20.1 | −1.13 | −4.70 | −4.70 | −1.17 | −2.22 |
| 13071-L5-3 | AGAGAAGGGGTGAGGATCTCCAGGGGTGACTGCT | 1116 | 32 | 7.2 | −2.11 | −2.11 | −2.11 | 1.69 | −2.11 |
| 13078-L5-1 | GCCCTCATTTCATAAGCCTGCTAGACAGGAGA | 1117 | 32 | 5.0 | −1.28 | −1.28 | −1.28 | −1.28 | 1.18 |
| 13185-L5-3 | TTCTGTTTTTTTTCTTCCCTCTCTCCCCTCTT | 1118 | 21 | 13.4 | −1.02 | −1.33 | −6.52 | −1.77 | −1.16 |
| 13216-R5-2 | ATATATTCCTCCTTTCTCCTCTCTGGCAGCTGA | 1119 | 26 | 5.1 | −1.79 | −1.79 | −1.79 | −1.79 | −1.03 |
| 13225-L5-1 | CTGCCCACTTCTGGGACAGCCCCTTCCATCTTC | 1120 | 16 | 5.9 | −3.37 | −3.37 | −3.37 | −1.24 | −3.37 |
| 13235-R5-1 | CCTGGGCTTTCTAGTCTCAGCTCTCCTCCAGCT | 1121 | 42 | 5.1 | 1.75 | 2.72 | −2.00 | −2.00 | −1.22 |
| 13245-L5-4 | ATTCCAAATAGTCTTTCCCTTCTACTCCCTTTAAA | 1122 | 16 | 12.2 | −2.87 | −2.87 | −2.87 | −2.87 | −2.25 |
| 13252-L5-3 | ACGTGCCTTCCTGACTGTGAGCTCCTTGAGAGC | 1123 | 32 | 5.0 | 3.73 | 2.50 | −1.79 | 3.92 | 1.23 |
| 13274-L5-3 | CCTTCTCTTCTCCCGTGCTCCCACCCTCCCTCAGGG | 1124 | 26 | 6.2 | −1.53 | −1.73 | −2.51 | −1.80 | −1.69 |
| 13300-L5-1 | TTACACACAGAATTATCTCCCCTCCTACTTACCC | 1125 | 16 | 7.4 | −1.04 | −6.08 | −6.08 | −2.44 | −3.08 |
| 13309-R5-1 | TCCCCCTTGTCTTCAGCTACAATTTTTCTGTG | 1126 | 16 | 8.2 | 1.66 | −3.05 | −3.05 | −3.05 | −3.05 |
| 13352-R5-1 | CCGGAACCTCAGCGCTGCATCTGTGAAATGGGG | 1127 | 37 | 5.8 | −3.13 | −3.13 | −3.13 | 1.36 | −2.38 |
| 13357-L5-4 | AGCGGACCTTCTCCCCACACCTCCCTGCAGCCTC | 1128 | 16 | 10.3 | −1.89 | −1.91 | −6.27 | −2.80 | −2.38 |
| 13366-R5-3 | CAGGCCTCACCCCAGTGCCCTCTCCTATTCCCAC | 1129 | 16 | 6.5 | −1.56 | −5.82 | −11.70 | −1.40 | −1.25 |
| 13373-R5-2 | TGTGGGGGGAGGGTGGTCAGCAGGTGGGGCAG | 1130 | 42 | 5.1 | −1.86 | −1.86 | −1.86 | 3.87 | −1.44 |
| 13375-R5-4 | GTACCAGCTCTCAGACCCTCACCACAGCCTGGGGG | 1131 | 32 | 5.8 | −7.06 | −7.06 | −7.06 | −2.47 | −1.39 |
| 13398-R5-4 | TTCTCTCTCCCTCCACCTTTTGTGCCACCACTT | 1132 | 16 | 15.6 | −5.01 | −2.59 | −5.01 | −1.56 | −2.35 |
| 13417-R5-4 | TGCCCTTCCTTCTGTTAACACCAGCCAGATCCCC | 1133 | 32 | 6.4 | −1.82 | −1.82 | −1.82 | 2.57 | 1.34 |
| 13436-L5-1 | AGCTCAATGAAGCCCCCAGCTAGGTCATGCCTC | 1134 | 21 | 5.3 | −2.80 | −8.31 | −20.29 | −2.23 | −2.79 |
| 13468-L5-1 | CAAGTGGCCATCAGACCCTCTTTGCCCCAAGTC | 1135 | 21 | 25.5 | −1.16 | −1.16 | −1.16 | −1.16 | 1.07 |
| 13470-R5-1 | TCCCACCCTCTCCACCTCAGGGACCAGAATCCT | 1136 | 21 | 13.2 | −1.29 | −3.12 | −6.50 | −1.24 | −1.23 |
| 13473-L5-3 | TATGTTTGCCCTTCTACCACCTATCCTGATACA | 1137 | 21 | 9.2 | −1.57 | −1.57 | −1.57 | 1.32 | 1.04 |
| 13500-L5-3 | CCAAGATCTTCCAGGCCTCTCTCTCCATTGAGT | 1138 | 37 | 6.4 | −1.38 | −1.38 | −1.38 | 2.14 | 1.20 |
| 13522-L5-4 | CTGCCTCACCTGAGCTCCCGTGCCTGTGCACCCTC | 1139 | 16 | 5.3 | −3.11 | −3.11 | −3.11 | −3.11 | −2.36 |
| 13523-R5-1 | GTGGAATAGTAAGGCTTCTTCCCCTGCCTGGC | 1140 | 26 | 5.3 | −3.75 | −3.75 | −1.20 | 1.11 | 1.61 |
| 13545-L5-1 | GCCTGTGGCGCAAGGGAGGCTGTGAGTCTGGGG | 1141 | 21 | 5.3 | −2.13 | −2.13 | −2.13 | 1.70 | −2.13 |
| 227-L5-1 | ACACCTGTCTCTCCCCAGTGCTTCCGCCCCTCA | 1142 | 16 | 5.0 | −2.46 | −3.09 | −2.60 | −3.09 | −3.20 |
| 3744-R5-1 | CTTCTCCTTCCTCCCTGCTCCCCTCCCACTAATGCCA | 1143 | 37 | 6.7 | −1.38 | −2.00 | −2.67 | −1.30 | −1.23 |
| | AAT | | | | | | | | |
| 3875-R5-2 | GACTGATTCAACCTCTCTCTCCCACTTTA | 1144 | 32 | 19.0 | −2.72 | −2.72 | −2.72 | 1.47 | −1.32 |
| 3926-L5-1 | ACTGATAATTCATTAGCATTCTTGAACGTGCCCCCAC | 1145 | 16 | 5.1 | −2.22 | −2.22 | −2.22 | −2.22 | −2.22 |
| | T | | | | | | | | |
| 3992-R5-1 | GCCCCTTTCTCTTCTGTCAGTATCTGAGCTGATGGTT | 1146 | 32 | 6.7 | −1.27 | −1.27 | −1.27 | −1.27 | −1.27 |
| | G | | | | | | | | |
| 4203-R3-2 | GCACATTCCCACTTCCCCAGAGGCAGGCTCCATAT | 1147 | 16 | 6.0 | −2.01 | −2.01 | −2.01 | −1.45 | −2.01 |
| 4261-R5-1 | AATAACCCTCCTTCCTTGATAGATTTCAC | 1148 | 21 | 6.4 | −2.52 | −2.52 | −2.52 | −2.52 | −1.56 |
| 4291-R5-1 | GATCAGGTAGTTACCAGGAGCCATGGGGGTGTACA | 1149 | 37 | 6.0 | −1.67 | −1.67 | −1.67 | −1.25 | −1.67 |
| 4790-L5-2 | TAACCTGTCTCCCTCATTACTAGAATTCT | 1150 | 21 | 12.6 | −1.56 | −1.56 | −1.56 | −1.56 | −1.32 |
| 4958-L5-1 | TAACCTGTCTCCCTCATTACTAGAATTCT | 1151 | 32 | 5.0 | −2.14 | −2.14 | −2.14 | −1.00 | −2.14 |
| 4988-R5-2 | GAGAATTAATAAACCATGGCATCTTCTGAAAATGGGG | 1152 | 16 | 5.3 | −2.97 | −3.81 | −7.10 | −2.52 | −2.60 |
| 5108-R5-2 | CTCCTCCTCCCCGTCTTTGGATACCAAACAC | 1153 | 21 | 16.5 | −1.14 | −1.67 | −4.77 | −1.11 | −1.10 |
| 5232-L5-2 | CCCTCTCCTCCCACACCGTCACTCACAATAACCC | 1154 | 32 | 5.2 | −1.81 | −1.81 | 1.81 | −1.34 | −1.44 |
| 5392-R5-1 | TCCTCCTCCTTCATTTGCAGGACATCAAGG | 1155 | 42 | 7.0 | −2.12 | −2.12 | −2.12 | 2.25 | −1.14 |
| 5723-R5-1 | CCCTCTCCGACAGTATCTCATTACAATAATTGCTAAT | 1156 | 16 | 6.9 | −1.96 | −3.89 | −8.51 | −5.58 | −3.53 |
| | CTC | | | | | | | | |
| 5836-L5-1 | CCTCCTCCCCTTTCTCCAGCAGTAGCCTTCTTAA | 1157 | 26 | 5.0 | −2.14 | −2.14 | −2.14 | 1.48 | −2.14 |
| 5842-R5-1 | TCTTGGGAACCAAGGGGGCTACAG | 1158 | 32 | 6.0 | 2.40 | −5.08 | −5.08 | 2.54 | 1.13 |
| 6037-R3-2 | GCAATTCCCTTTCCTCCATCTCCAATTTTCCTC | 1159 | 32 | 7.4 | −1.71 | −1.71 | −1.71 | −1.71 | −1.32 |
| 6181-L5-1 | CATGGTAAACTTAGATGACTCTTCCCCCTGGATTT | 1160 | 26 | 8.6 | −1.40 | −1.40 | −1.40 | −1.40 | −1.40 |
| 6233-L5-2 | CAAAATTAGATTTCCACTTTATCCTTCTCCC | 1161 | 16 | 10.1 | −3.02 | −3.02 | −3.02 | −1.89 | −1.92 |
| 6395-L5-1 | TCTCCCCTGCAGAGAGGAGGAAAGCCTGCCTCGGAAC | 1162 | 21 | 8.4 | −3.73 | −3.73 | −3.73 | 1.09 | −1.93 |
| 6405-R5-1 | TCAAAGAAAAATAAGTGAAAGCATATCTCATCATGGG | 1163 | 32 | 5.7 | −2.10 | −2.10 | −2.10 | −2.10 | −2.10 |
| | G | | | | | | | | |
| 6474-L5-1 | CCCTAATTAAAGCCATCCCCTCTTCCCCCTTCACC | 1164 | 16 | 11.9 | −11.16 | −5.02 | −11.16 | −1.96 | −1.85 |
| 6602-R3-1 | AGAGCCCCAGTGGAAATCTCTCCTCCAAATCCAT | 1165 | 32 | 8.8 | −1.36 | −1.36 | −1.36 | −1.36 | −1.06 |
| 6681-R2-1 | CCTGTTTTCTCCCCTCTCTCTCTGCCCCTCC | 1166 | 16 | 5.0 | −1.60 | −2.15 | −3.96 | −1.87 | −1.45 |
| 6683-R5-1 | TCATCCCAAAATAAACTCTTCCTGCTCAAG | 1167 | 37 | 11.9 | −1.39 | −1.39 | −1.39 | 1.04 | 1.29 |
| 6752-R5-2 | CCCTCCTTTCCCCACCTCAGTCGGGCCACTGCT | 1168 | 16 | 6.4 | −7.01 | −7.01 | −4.90 | −2.94 | −2.85 |
| 6803-R5-2 | GCTCCCTCTCTGGTTGGACCTCACCCAAA | 1169 | 21 | 12.2 | 1.30 | −2.22 | −1.17 | −1.05 | −1.19 |
| 6864-R4-1 | GACACACAATTACACTCCCCTGGAG | 1170 | 21 | 12.5 | −1.50 | −1.50 | −1.50 | −1.50 | −1.50 |
| 6872-L5-1 | AAGACTCTGTCACAGTCTGTGACCCGGTGGGG | 1171 | 42 | 5.2 | −1.96 | −1.96 | −1.96 | −1.00 | −1.96 |
| 6906-L5-1 | TCTTCTCCCCAACCAGCCAGCTCTCCTGG | 1172 | 21 | 8.0 | −2.17 | −2.17 | −2.17 | −2.17 | −2.17 |
| 6930-R5-1 | TTAATCCTTCTCTCCCCTCTGATCTTGCAG | 1173 | 16 | 14.8 | −1.27 | −1.66 | −4.45 | −1.91 | −1.65 |
| 7631-L3-2 | CCTAGACGCCAGCTGCCTGCATGAAGCCTGCCCAA | 1174 | 26 | 5.2 | −2.68 | −2.68 | −2.68 | 1.68 | 2.02 |
| 7764-R3-2 | CCCTCTCTGCCTCTCTCATCACCAATAACAGAC | 1175 | 16 | 9.3 | −1.03 | −3.64 | −3.64 | −1.33 | 1.24 |
| 7849-L2-2 | GAAATATCAAGACAAATAAGATGTTTGGGGGCACA | 1176 | 16 | 6.1 | −2.04 | −2.04 | −2.04 | −1.42 | −2.04 |
| 8316-R5-1 | CAGGGTATCCTCTCCCCACGTGATGCC | 1177 | 42 | 20.3 | 2.51 | −1.81 | −1.81 | 1.36 | 1.12 |
| 8433_C-R4-1 | AAACCAAAAAAAAAAAATTAAAAAGCGACGAAAATGC | 1178 | 16 | 14.3 | −1.03 | −2.46 | −5.42 | −1.38 | −1.21 |
| | AATTGTGTGCCTTCTCCCTCC | | | | | | | | |
| 8433-L3-1 | AAATGGCTCCTTTCCCCTTTCCCTCCACCG | 1179 | 16 | 6.9 | −1.70 | −1.71 | −5.48 | −2.04 | −1.62 |
| 8452-L3-1 | ATGGCCACATACATGGCTGGGGTGTTGAA | 1180 | 21 | 7.6 | −1.08 | −1.08 | −1.08 | −1.08 | −1.08 |
| 8724-R5-2 | GGCCAAGCTTGGAACCTCTCCCTGCCAGCA | 1181 | 16 | 6.0 | −1.71 | −2.12 | −4.29 | −1.92 | −1.69 |
| 8746-R5-1 | TAAGCGCAGGATGGGGGTATTCAAGTCCAAAGC | 1182 | 37 | 5.4 | −2.03 | −2.03 | −2.03 | 1.54 | −2.03 |
| 8808-R5-1 | GACCCCTTTCTCCCAGCCTGTTTCTGCAA | 1183 | 21 | 8.4 | −1.07 | −2.31 | −4.54 | −4.54 | −2.03 |
| 8832-R5-1 | TGGAGTACCACCTGTTTTTCCCCCACTT | 1184 | 32 | 6.0 | −1.37 | −1.37 | −1.37 | −1.37 | −1.06 |
| 8879-L5-1 | TGGGGGCTGGGGCGCAGGTCGAGAGCCCAGGGG | 1185 | 32 | 5.2 | −1.79 | −1.79 | −1.79 | −1.30 | −1.79 |
| 9485-L5-1 | TGCTGCACTCCATCCTCCCACAATGGCCCCATTGTTC | 1186 | 26 | 5.2 | −3.02 | −3.02 | −3.02 | 1.26 | −3.02 |
| | CCAG | | | | | | | | |
| 9507-L5-1 | GTCTCCCTCATCCATCATCCACCA | 1187 | 26 | 6.0 | −1.45 | −1.45 | −1.45 | −1.45 | 1.16 |
| 9798-L5-1 | CTCTATATATACCTGGTATGACTTCTTTGGGGGGAAA | 1188 | 42 | 9.9 | −1.40 | −1.40 | −1.40 | 3.74 | 1.36 |
| | GAAAAGCAC | | | | | | | | |
| 999996-L4-1 | GGGAGGAGTCAGGTGTGTGCTGTGGGTTGGGGGAAGA | 1189 | 21 | 5.3 | −4.63 | −4.63 | −4.63 | 1.35 | −1.12 |
| | C | | | | | | | | |
| 999999-R4-1 | CCCCTTGTCACCCCCAGCCCCTTCCTGGCCAGGACCC | 1190 | 16 | 5.2 | −1.71 | −9.15 | −23.66 | −3.15 | −2.48 |
| | CAGCGAGGCCCAGAGAA | | | | | | | | |
| miR-103 | TCATAGCCCTGTACAATGCTGCT | 1191 | 26 | 5.0 | 1.81 | −3.09 | 1.10 | 1.01 | 1.33 |
| miR-1202 | CTCCCCCACTGCAGCTGGCAC | 1192 | 16 | 5.4 | −1.58 | −7.52 | −7.52 | −5.40 | −4.07 |
| miR-1249 | TGAAGAAGGGGGGGAAGGGCGT | 1193 | 32 | 5.0 | −2.26 | −2.26 | −2.26 | 1.48 | −1.92 |
| miR-1275 | GACAGCCTCTCCCCCAC | 1194 | 16 | 12.7 | 1.07 | −1.12 | −12.61 | −1.07 | −2.42 |
| miR-129-3p | ATGCTTTTTGGGGTAAGGGCTT | 1195 | 11 | 21.4 | −1.00 | −1.00 | −1.00 | −1.00 | −1.00 |
| miR-1321 | ATCACATTCACCTCCCTG | 1196 | 16 | 5.9 | −2.14 | −2.14 | −2.14 | −1.05 | −2.14 |
| miR-1323 | AGAAAATGCCCCTCAGTTTTGA | 1197 | 47 | 5.0 | 2.09 | −1.57 | −3.13 | 1.70 | −1.05 |
| miR-141 | CCATCTTTACCAGACAGTGTTA | 1198 | 42 | 5.6 | 4.01 | −1.96 | −1.37 | 2.58 | 3.17 |
| miR-143 | GAGCTACAGTGCTTCATCTCA | 1199 | 42 | 5.8 | 1.65 | −4.11 | 1.63 | 1.38 | 1.30 |
| miR-182 | AGTGTGAGTTCTACCATTGCCAAA | 1200 | 37 | 8.7 | −1.00 | −1.00 | −1.00 | 2.28 | 1.51 |
| miR-183 | AGTGAATTCTACCAGTGCCATA | 1201 | 21 | 10.0 | −1.00 | −1.00 | −1.00 | −1.00 | −1.00 |
| miR-198 | GAACCTATCTCCCCTCTGGACC | 1202 | 21 | 12.6 | −4.73 | −4.73 | −4.73 | −1.31 | −2.54 |
| miR-19a | TCAGTTTTGCATAGATTTGCACA | 1203 | 47 | 5.0 | 2.88 | −1.76 | −1.23 | 2.71 | −1.03 |
| miR-30c-1* | GGAGTAAACAACCCTCTCCCAG | 1204 | 26 | 11.2 | −1.05 | −8.25 | −8.25 | −1.14 | −1.53 |
| miR-375 | TCACGCGAGCCGAACGAACAAA | 1205 | 32 | 16.2 | −1.60 | 4.80 | −1.60 | 2.88 | −1.60 |
| miR-376c | ACGTGGAATTTCCTCTATGTT | 1206 | 16 | 62.7 | −1.12 | −1.12 | −1.12 | −1.12 | −1.12 |
| miR-429 | ACGGTTTTACCAGACAGTATTA | 1207 | 16 | 8.1 | 3.25 | −1.00 | −1.00 | −1.00 | −1.00 |
| miR-483-5p | CTCCCTTCTTTCCTCCCGTCTT | 1208 | 42 | 10.1 | 2.71 | −1.10 | −3.38 | 2.43 | 1.23 |
| miR-516a-5p | GAAAGTGCTTCTTTCCTCGAGAA | 1209 | 47 | 8.8 | 2.57 | −1.65 | −1.65 | 1.35 | −1.19 |
| miR-7 | ACAACAAAATCACTAGTCTTCCA | 1210 | 21 | 86.3 | −1.00 | −1.00 | 1.53 | −1.00 | 1.56 |

TABLE 21
Target RNAs present at levels at least 5-fold higher than normal levels
in less than 50% of tumor samples (con't)

| | % | Fold | | | | | |
|---|---|---|---|---|---|---|---|
| Gene | tumors increased | Change Average | ADK48 | Adk40 | Adk41 | Adk49 | Epi42 |
| 10083-L5-1 | 16 | 11.2 | −3.12 | −10.22 | −10.22 | −4.85 | 1.60 |
| 10233-R5-1 | 16 | 13.1 | −1.29 | −15.77 | −1.70 | 1.17 | 1.33 |
| 10335-L5-2 | 16 | 5.3 | −2.42 | −8.23 | −8.23 | −8.23 | 1.82 |
| 10357-R5-1 | 16 | 6.0 | −1.13 | 12.33 | −1.13 | 1.73 | −1.13 |
| 10520-L5-1 | 26 | 5.9 | −1.42 | −1.42 | −1.42 | −1.42 | −1.42 |
| 10844-R4-1 | 26 | 5.4 | 5.98 | 4.89 | 1.80 | 4.75 | 6.90 |
| 11358-R5-2 | 21 | 5.3 | 4.38 | −2.77 | 1.50 | 7.69 | 5.96 |
| 11444-L5-3 | 21 | 8.8 | −1.20 | −1.20 | −1.20 | −1.20 | −1.20 |
| 11547-R4-1 | 16 | 7.6 | −2.09 | −2.09 | −2.09 | −2.09 | 1.98 |
| 11605-L5-4 | 26 | 5.0 | −2.54 | −2.54 | −2.54 | −2.54 | −2.54 |
| 11688-R5-3 | 32 | 6.0 | 6.88 | 2.76 | 1.49 | 5.01 | 7.47 |
| 12699-R5-2 | 26 | 6.0 | 1.74 | 7.41 | 5.23 | 5.07 | 7.67 |
| 12707-L5-2 | 42 | 5.0 | −1.91 | −1.91 | −1.91 | 6.52 | −1.91 |
| 12729-R5-1 | 16 | 11.8 | −5.55 | −5.55 | −5.55 | −5.55 | −5.55 |
| 12730-R5-1 | 37 | 7.3 | −1.10 | −3.66 | −3.66 | 3.20 | −1.72 |
| 12888-L5-2 | 47 | 21.7 | −1.64 | −1.64 | −1.64 | 7.18 | 1.22 |
| 12907-L5-1 | 26 | 6.4 | −3.23 | −3.23 | −3.23 | −1.68 | 4.63 |
| 12912-L5-2 | 37 | 5.3 | −2.26 | −2.26 | −2.26 | −1.02 | −2.26 |
| 12917-R5-2 | 47 | 6.0 | −3.76 | −3.76 | −3.76 | −3.76 | 2.93 |
| 12958-R5-1 | 32 | 5.1 | −1.32 | −1.32 | −1.32 | −1.32 | −1.32 |
| 12974-R5-2 | 21 | 16.1 | −1.94 | −1.94 | −1.94 | −1.94 | −1.94 |
| 12979-R5-2 | 42 | 16.3 | −1.39 | −1.39 | −1.39 | −1.39 | −1.39 |
| 12992-L5-1 | 16 | 6.7 | −9.54 | −9.54 | −9.54 | −4.91 | 1.18 |
| 13001-L5-1 | 32 | 15.5 | −1.83 | −1.83 | −1.83 | 1.30 | −1.83 |
| 13053-R5-4 | 26 | 5.6 | −1.32 | −1.32 | −1.32 | −1.32 | −1.32 |
| 13070-R5-3 | 16 | 20.1 | −1.56 | −1.56 | −4.70 | −1.74 | −2.22 |
| 13071-L5-3 | 32 | 7.2 | 9.95 | 11.19 | −2.11 | 2.59 | 8.14 |
| 13078-L5-1 | 32 | 5.0 | −1.28 | −1.28 | −1.28 | −1.28 | −1.28 |
| 13185-L5-3 | 21 | 13.4 | 1.19 | −10.17 | −4.63 | −2.11 | 1.40 |
| 13216-R5-2 | 26 | 5.1 | −1.79 | −1.79 | −1.79 | −1.79 | −1.79 |
| 13225-L5-1 | 16 | 5.9 | −3.37 | −3.37 | −3.37 | −1.14 | −1.38 |
| 13235-R5-1 | 42 | 5.1 | −2.00 | 6.84 | −2.00 | −2.00 | −2.00 |
| 13245-L5-4 | 16 | 12.2 | −2.87 | −2.87 | −2.87 | −2.87 | −2.87 |
| 13252-L5-3 | 32 | 5.0 | 7.58 | −3.66 | −3.66 | 3.75 | −1.66 |
| 13274-L5-3 | 26 | 6.2 | −1.00 | −1.48 | −2.00 | 1.50 | 1.33 |
| 13300-L5-1 | 16 | 7.4 | −1.75 | −6.08 | −6.08 | −1.13 | −2.47 |
| 13309-R5-1 | 16 | 8.2 | −3.05 | −3.05 | −3.05 | −3.05 | −3.05 |
| 13352-R5-1 | 37 | 5.8 | 6.85 | 7.65 | −3.13 | 4.84 | 4.78 |
| 13357-L5-4 | 16 | 10.3 | −4.08 | −13.36 | −13.36 | −1.26 | −1.04 |
| 13366-R5-3 | 16 | 6.5 | −3.19 | −11.70 | −11.70 | 1.49 | −4.14 |
| 13373-R5-2 | 42 | 5.1 | 8.95 | 6.03 | 4.53 | 2.23 | 6.76 |
| 13375-R5-4 | 32 | 5.8 | 1.45 | −1.36 | 3.34 | 5.09 | 3.16 |
| 13398-R5-4 | 16 | 15.6 | −1.64 | −5.01 | −5.01 | −5.01 | −5.01 |
| 13417-R5-4 | 32 | 6.4 | −1.82 | −1.82 | −1.82 | 2.73 | 11.74 |
| 13436-L5-1 | 21 | 5.3 | 10.40 | −20.29 | −20.29 | 3.70 | −3.72 |
| 13468-L5-1 | 21 | 25.5 | −1.16 | −1.16 | −1.16 | −1.16 | −1.16 |
| 13470-R5-1 | 21 | 13.2 | −6.50 | −6.50 | −6.50 | 1.75 | 2.16 |
| 13473-L5-3 | 21 | 9.2 | −1.57 | −1.57 | −1.57 | −1.57 | −1.57 |
| 13500-L5-3 | 37 | 6.4 | −1.38 | −1.38 | −1.38 | −1.38 | −1.38 |
| 13522-L5-4 | 16 | 5.3 | −3.11 | −3.11 | −3.11 | 3.37 | −3.11 |
| 13523-R5-1 | 26 | 5.3 | −3.75 | −3.75 | −3.75 | 1.01 | −3.75 |
| 13545-L5-1 | 21 | 5.3 | 1.56 | 5.75 | 4.10 | 4.33 | 7.14 |
| 227-L5-1 | 16 | 5.0 | −1.10 | −8.03 | −2.54 | −1.26 | −1.22 |
| 3744-R5-1 | 37 | 6.7 | 1.22 | −1.55 | −1.88 | 2.15 | 1.70 |
| 3875-R5-2 | 32 | 19.0 | −2.72 | −2.72 | −2.72 | −2.72 | −2.72 |
| 3926-L5-1 | 16 | 5.1 | −2.22 | −2.22 | −2.22 | −2.22 | 5.38 |
| 3992-R5-1 | 32 | 6.7 | −1.27 | −1.27 | −1.27 | −1.27 | −1.27 |
| 4203-R3-2 | 16 | 6.0 | −2.01 | −2.01 | −2.01 | −2.01 | −2.01 |
| 4261-R5-1 | 21 | 6.4 | 1.22 | −2.52 | −2.52 | 1.50 | 4.19 |
| 4291-R5-1 | 37 | 6.0 | 6.21 | 9.19 | 5.89 | 2.44 | 7.75 |
| 4790-L5-2 | 21 | 12.6 | −1.56 | −1.56 | −1.56 | −1.56 | −1.56 |
| 4958-L5-1 | 32 | 5.0 | 4.94 | 6.00 | 4.13 | 4.23 | 6.24 |
| 4988-R5-2 | 16 | 5.3 | 1.08 | −25.28 | −3.70 | −1.17 | 1.20 |
| 5108-R5-2 | 21 | 16.5 | −2.27 | −7.21 | −7.21 | 1.49 | 1.77 |
| 5232-L5-2 | 32 | 5.2 | −1.81 | −1.81 | −1.81 | −1.81 | 5.58 |
| 5392-R5-1 | 42 | 7.0 | −2.12 | −2.12 | −2.12 | 3.87 | 4.77 |
| 5723-R5-1 | 16 | 6.9 | −2.80 | −8.51 | −8.51 | −2.09 | 1.62 |
| 5836-L5-1 | 26 | 5.0 | 1.59 | 6.47 | 4.54 | 2.07 | 7.39 |
| 5842-R5-1 | 32 | 6.0 | −1.05 | −5.08 | 1.12 | −1.02 | 2.33 |
| 6037-R3-2 | 32 | 7.4 | −1.71 | −1.71 | −1.71 | −1.71 | −1.71 |
| 6181-L5-1 | 26 | 8.6 | −1.40 | −1.40 | −1.40 | −1.40 | −1.40 |
| 6233-L5-2 | 16 | 10.1 | −3.02 | −3.02 | −3.02 | −3.02 | −3.02 |
| 6395-L5-1 | 21 | 8.4 | −3.73 | −3.73 | −3.73 | 1.35 | 4.16 |
| 6405-R5-1 | 32 | 5.7 | 6.13 | 7.07 | 4.77 | 5.11 | 6.86 |
| 6474-L5-1 | 16 | 11.9 | −3.05 | −11.16 | −11.16 | −11.16 | −4.35 |
| 6602-R3-1 | 32 | 8.8 | −1.36 | −1.36 | −1.36 | −1.36 | −1.36 |
| 6681-R2-1 | 16 | 5.0 | −1.47 | −1.37 | −1.55 | −1.23 | 1.40 |
| 6683-R5-1 | 37 | 11.9 | −1.39 | −1.39 | −1.39 | 1.48 | −1.39 |
| 6752-R5-2 | 16 | 6.4 | −2.32 | −7.01 | −1.56 | −7.01 | −1.38 |
| 6803-R5-2 | 21 | 12.2 | 1.33 | 1.11 | −1.53 | 1.68 | 1.59 |
| 6864-R4-1 | 21 | 12.5 | 2.22 | −1.50 | −1.50 | 1.54 | 1.44 |
| 6872-L5-1 | 42 | 5.2 | 5.15 | 7.34 | 4.47 | 4.25 | 5.82 |
| 6906-L5-1 | 21 | 8.0 | −2.17 | −2.17 | −2.17 | −2.17 | −2.17 |
| 6930-R5-1 | 16 | 14.8 | −2.83 | −10.13 | −10.13 | 1.07 | 1.26 |
| 7631-L3-2 | 26 | 5.2 | −2.68 | −2.68 | −2.68 | −1.18 | 7.17 |
| 7764-R3-2 | 16 | 9.3 | −3.64 | −3.64 | −3.64 | −3.64 | −3.64 |
| 7849-L2-2 | 16 | 6.1 | 1.61 | 6.57 | 4.84 | 1.03 | 6.78 |
| 8316-R5-1 | 42 | 20.3 | −1.81 | −1.81 | −1.81 | −1.81 | −1.81 |
| 8433_C-R4-1 | 16 | 14.3 | −1.74 | −5.42 | −5.42 | −1.36 | −2.50 |
| 8433-L3-1 | 16 | 6.9 | 1.35 | −8.08 | −8.08 | −4.05 | 1.17 |
| 8452-L3-1 | 21 | 7.6 | −1.08 | 11.39 | 4.06 | 4.04 | 11.10 |
| 8724-R5-2 | 16 | 6.0 | −2.90 | −9.03 | −4.67 | 1.24 | 1.37 |
| 8746-R5-1 | 37 | 5.4 | 6.65 | 6.64 | 4.26 | 4.91 | 6.70 |
| 8808-R5-1 | 21 | 8.4 | −4.54 | −4.54 | −4.54 | −4.54 | −4.54 |
| 8832-R5-1 | 32 | 6.0 | −1.37 | −1.37 | −1.37 | −1.37 | −1.37 |
| 8879-L5-1 | 32 | 5.2 | 5.93 | 6.75 | 2.28 | 1.04 | 6.13 |
| 9485-L5-1 | 26 | 5.2 | −3.02 | −3.02 | −3.02 | 2.49 | 3.21 |
| 9507-L5-1 | 26 | 6.0 | −1.45 | −1.45 | −1.45 | −1.45 | −1.45 |
| 9798-L5-1 | 42 | 9.9 | 14.66 | 15.37 | 4.13 | 9.21 | 16.73 |
| 999996-L4-1 | 21 | 5.3 | 6.41 | −1.05 | 5.20 | 4.33 | 1.88 |
| 999999-R4-1 | 16 | 5.2 | 9.26 | −23.66 | −1.25 | 2.35 | −7.93 |
| miR-103 | 26 | 5.0 | −1.99 | −6.84 | 1.87 | 3.43 | 2.56 |
| miR-1202 | 16 | 5.4 | −7.52 | −7.52 | −7.52 | −7.52 | 1.62 |
| miR-1249 | 32 | 5.0 | 5.38 | 5.84 | 2.27 | 4.52 | 8.04 |
| miR-1275 | 16 | 12.7 | −12.61 | −4.87 | −12.61 | −1.62 | 1.01 |
| miR-129-3p | 11 | 21.4 | −1.00 | −1.00 | −1.00 | −1.00 | 11.04 |
| miR-1321 | 16 | 5.9 | −2.14 | −2.14 | −2.14 | −2.14 | −2.14 |
| miR-1323 | 47 | 5.0 | 1.07 | 1.16 | −3.13 | 4.58 | 11.61 |
| miR-141 | 42 | 5.6 | 1.66 | −1.96 | 1.02 | 5.85 | 1.14 |
| miR-143 | 42 | 5.8 | 4.04 | −4.11 | 2.93 | 5.90 | 5.59 |
| miR-182 | 37 | 8.7 | −1.00 | −1.00 | −1.00 | 11.30 | −1.00 |
| miR-183 | 21 | 10.0 | −1.00 | −1.00 | −1.00 | 8.60 | −1.00 |
| miR-198 | 21 | 12.6 | −4.73 | −4.73 | −4.73 | −2.51 | 1.98 |
| miR-19a | 47 | 5.0 | 1.80 | −1.76 | 7.21 | 8.91 | 6.26 |
| miR-30c-1* | 26 | 11.2 | −2.57 | −8.25 | −3.89 | 1.91 | 1.94 |
| miR-375 | 32 | 16.2 | −1.60 | −1.60 | −1.60 | −1.60 | −1.60 |
| miR-376c | 16 | 62.7 | −1.12 | −1.12 | −1.12 | −1.12 | −1.12 |
| miR-429 | 16 | 8.1 | −1.00 | −1.00 | −1.00 | −1.00 | −1.00 |
| miR-483-5p | 42 | 10.1 | 1.50 | −1.21 | −3.38 | 1.14 | 2.56 |
| miR-516a- | 47 | 8.8 | 6.97 | −1.65 | −1.65 | 1.17 | −1.65 |
| 5p | | | | | | | |
| miR-7 | 21 | 86.3 | −1.00 | −1.00 | −1.00 | 4.57 | −1.00 |

| Gene | Ksarc19 | Kmalp21 | Kmalp25 | EPI-4 | Kmalp44 | Scc27 | Lcnec31 | Car13 |
|---|---|---|---|---|---|---|---|---|
| 10083-L5-1 | 14.20 | 6.04 | −1.20 | 13.39 | −1.15 | 1.20 | −1.16 | −10.22 |
| 10233-R5-1 | 17.61 | 6.52 | −1.39 | 15.23 | 1.27 | 1.51 | 1.10 | −6.54 |
| 10335-L5-2 | 5.00 | 2.55 | −1.85 | 8.20 | −8.23 | −1.15 | −1.71 | −8.23 |
| 10357-R5-1 | 2.98 | −1.13 | 1.86 | −1.13 | −1.13 | 1.37 | −1.13 | −1.13 |
| 10520-L5-1 | 7.33 | 3.18 | 4.71 | 10.86 | −1.42 | 3.49 | 1.34 | −1.42 |
| 10844-R4-1 | 1.69 | 1.36 | 1.08 | −2.58 | 4.49 | 1.09 | −2.58 | −2.58 |
| 11358-R5-2 | 1.31 | −1.16 | 1.17 | −2.77 | 2.99 | 1.18 | −2.77 | −2.77 |
| 11444-L5-3 | 13.50 | 5.64 | −1.20 | 13.27 | −1.20 | 2.62 | −1.20 | −1.20 |
| 11547-R4-1 | 2.11 | 5.05 | 1.30 | 15.60 | −2.09 | 1.36 | −1.23 | −2.09 |
| 11605-L5-4 | 7.43 | 3.53 | 1.60 | 9.69 | −2.54 | 2.07 | 1.86 | −2.54 |
| 11688-R5-3 | 1.72 | 1.11 | −1.33 | −1.33 | 4.67 | −1.33 | −1.33 | −1.33 |
| 12699-R5-2 | 1.00 | 1.66 | 1.16 | −1.96 | 4.62 | −1.16 | 1.61 | −1.96 |
| 12707-L5-2 | 7.16 | 4.03 | 2.78 | −1.91 | 7.26 | 4.33 | 4.33 | −1.91 |
| 12729-R5-1 | 15.59 | 5.64 | −1.24 | 14.17 | 1.67 | 1.74 | 1.06 | −5.55 |
| 12730-R5-1 | 8.17 | 6.34 | 1.57 | 23.70 | 5.24 | 2.24 | 2.37 | −3.66 |
| 12888-L5-2 | 43.87 | 23.04 | 11.51 | 82.88 | 1.23 | 11.54 | 5.75 | −1.64 |
| 12907-L5-1 | 10.17 | 3.99 | 1.05 | 11.02 | 2.09 | 1.42 | 1.32 | −3.23 |
| 12912-L5-2 | 7.22 | 2.14 | 2.86 | 14.96 | −2.26 | 3.88 | 4.19 | −2.26 |
| 12917-R5-2 | 14.76 | 7.83 | 2.46 | 16.79 | 2.54 | 2.64 | 2.10 | −3.76 |
| 12958-R5-1 | 6.38 | 4.19 | 1.98 | 12.26 | −1.32 | 2.45 | 3.54 | −1.32 |
| 12974-R5-2 | 24.20 | 12.93 | 1.29 | 29.06 | −1.94 | 1.81 | 1.64 | −1.94 |
| 12979-R5-2 | 10.78 | 36.28 | 4.84 | 58.47 | 1.46 | 5.16 | 4.12 | −1.39 |
| 12992-L5-1 | 9.52 | 3.16 | −2.51 | 7.29 | −1.36 | −1.30 | −1.84 | −3.31 |
| 13001-L5-1 | 42.81 | 17.02 | 13.68 | 4.38 | −1.83 | 8.78 | 6.48 | −1.83 |
| 13053-R5-4 | 3.53 | 13.64 | 2.00 | 6.49 | −1.32 | 2.42 | 1.51 | −1.32 |
| 13070-R5-3 | 28.78 | 10.28 | −1.18 | 21.26 | 1.71 | 1.74 | 1.44 | −4.70 |
| 13071-L5-3 | 1.71 | −1.39 | 1.41 | −2.11 | 9.31 | −1.31 | −2.11 | 1.49 |
| 13078-L5-1 | 5.67 | 3.96 | 2.12 | 9.20 | −1.28 | 4.09 | 4.68 | −1.28 |
| 13185-L5-3 | 22.48 | 9.50 | −1.19 | 19.78 | 1.34 | 1.88 | 1.66 | −1.67 |
| 13216-R5-2 | 9.13 | 3.36 | 1.72 | 8.24 | −1.79 | 2.44 | 2.56 | −1.79 |
| 13225-L5-1 | 3.98 | 4.43 | 1.04 | 9.41 | −3.37 | 1.69 | 1.75 | −3.37 |
| 13235-R5-1 | 4.04 | 10.73 | 2.12 | 9.58 | 1.76 | 2.43 | 2.20 | −2.00 |
| 13245-L5-4 | 14.29 | 12.06 | 1.04 | 10.37 | −2.87 | 1.47 | 1.29 | −2.87 |
| 13252-L5-3 | −1.06 | −1.78 | 1.28 | 1.36 | −3.66 | 1.14 | 1.12 | −3.66 |
| 13274-L5-3 | 13.34 | 3.11 | 2.88 | 9.05 | 1.27 | 2.80 | 1.56 | −1.16 |
| 13300-L5-1 | 5.40 | 3.67 | −1.28 | 13.10 | −6.08 | 1.07 | −1.03 | −6.08 |
| 13309-R5-1 | 9.45 | 2.79 | 1.01 | 12.42 | −3.05 | 1.39 | −3.05 | −3.05 |
| 13352-R5-1 | 1.36 | −1.04 | −1.01 | −3.13 | 7.39 | 1.08 | −1.49 | 3.02 |
| 13357-L5-4 | 13.07 | 4.68 | −1.56 | 13.01 | −1.17 | 1.17 | −1.45 | −13.36 |
| 13366-R5-3 | 6.00 | 3.36 | −1.62 | 10.24 | −4.94 | −1.07 | −1.49 | −11.70 |
| 13373-R5-2 | 1.51 | 4.97 | 1.11 | −1.86 | 3.80 | −1.32 | −1.06 | −1.86 |
| 13375-R5-4 | 2.32 | −1.53 | −1.93 | 4.20 | 16.42 | −1.56 | −3.11 | −7.06 |
| 13398-R5-4 | 24.60 | 7.38 | −1.41 | 14.84 | −5.01 | 1.57 | 1.33 | −5.01 |
| 13417-R5-4 | 7.23 | 4.35 | −1.82 | 9.97 | −1.82 | −1.82 | 1.33 | −1.82 |
| 13436-L5-1 | −1.06 | 2.55 | −2.03 | 4.35 | −1.04 | −1.31 | −2.32 | −20.29 |
| 13468-L5-1 | 25.58 | 42.79 | −1.16 | 31.50 | −1.16 | 2.25 | −1.16 | −1.16 |
| 13470-R5-1 | 22.13 | 9.28 | −1.38 | 19.17 | 1.62 | 1.31 | 1.04 | −6.50 |
| 13473-L5-3 | 12.99 | 5.85 | 1.57 | 15.53 | −1.57 | 2.39 | 1.37 | −1.57 |
| 13500-L5-3 | 11.94 | 6.95 | 2.11 | 14.71 | −1.38 | 2.73 | 3.87 | −1.38 |
| 13522-L5-4 | 2.60 | 1.14 | 1.10 | 9.89 | −3.11 | 1.73 | 1.65 | −3.11 |
| 13523-R5-1 | 7.12 | 4.25 | 1.30 | 11.04 | 1.81 | 2.32 | 1.90 | −3.75 |
| 13545-L5-1 | 1.80 | −1.46 | 1.04 | −2.13 | −2.13 | −2.13 | −2.13 | −2.13 |
| 227-L5-1 | 3.33 | 5.25 | −1.86 | 5.98 | 1.00 | −1.14 | −1.09 | −4.63 |
| 3744-R5-1 | 17.73 | 4.94 | 4.32 | 12.79 | 1.63 | 2.72 | 1.99 | −2.37 |
| 3875-R5-2 | 47.37 | 21.41 | 1.80 | 36.52 | 3.32 | 2.67 | 2.60 | −2.72 |
| 3926-L5-1 | 1.86 | 2.06 | 1.37 | 7.91 | −2.22 | 1.57 | −1.06 | −2.22 |
| 3992-R5-1 | 11.59 | 6.64 | 2.32 | 12.31 | −1.27 | 3.77 | 3.55 | −1.27 |
| 4203-R3-2 | 7.42 | 3.12 | −2.01 | 7.32 | −2.01 | −1.16 | −2.01 | −2.01 |
| 4261-R5-1 | 5.56 | 9.03 | 1.23 | 6.64 | −2.52 | 1.69 | 1.33 | −2.52 |
| 4291-R5-1 | −1.03 | 1.01 | −1.67 | −1.67 | 4.73 | −1.67 | −1.67 | −1.67 |
| 4790-L5-2 | 21.19 | 7.09 | 1.61 | 19.81 | −1.56 | 2.37 | 1.17 | −1.56 |
| 4958-L5-1 | −2.14 | −1.19 | −1.04 | −2.14 | 4.24 | −2.14 | −2.14 | −2.14 |
| 4988-R5-2 | 5.54 | 3.48 | −2.05 | 6.82 | 1.28 | 1.05 | −1.34 | −8.12 |
| 5108-R5-2 | 31.12 | 11.82 | 1.05 | 21.13 | 1.91 | 2.06 | 1.54 | −1.29 |
| 5232-L5-2 | 6.39 | 2.75 | 2.65 | 1.47 | −1.81 | 2.30 | −1.81 | −1.81 |
| 5392-R5-1 | 15.89 | 6.70 | 1.74 | 16.76 | 3.71 | 1.91 | 1.15 | −2.12 |
| 5723-R5-1 | 8.94 | 2.94 | −1.53 | 8.79 | 1.02 | 1.08 | −1.42 | −8.51 |
| 5836-L5-1 | 1.66 | −1.54 | −2.14 | −2.14 | 4.43 | −2.14 | −2.14 | −2.14 |
| 5842-R5-1 | 2.71 | 9.50 | 1.02 | 16.41 | −1.31 | −1.32 | −1.44 | −5.08 |
| 6037-R3-2 | 16.51 | 6.11 | 1.91 | 14.55 | −1.71 | 2.97 | 2.07 | −1.71 |
| 6181-L5-1 | 16.60 | 5.10 | 1.57 | 15.61 | −1.40 | 2.68 | 2.92 | −1.40 |
| 6233-L5-2 | 10.71 | 4.99 | −1.05 | 14.68 | −3.02 | 1.54 | 1.57 | −3.02 |
| 6395-L5-1 | 7.80 | 6.46 | −1.04 | 15.00 | −3.73 | 1.67 | 1.45 | −3.73 |
| 6405-R5-1 | −2.10 | 1.46 | −2.10 | −2.10 | 4.48 | −2.10 | −2.10 | −2.10 |
| 6474-L5-1 | 14.82 | 7.02 | −1.48 | 13.75 | −4.80 | 1.09 | −1.19 | −11.16 |
| 6602-R3-1 | 19.18 | 6.22 | 3.09 | 17.33 | −1.36 | 3.82 | 2.93 | −1.36 |
| 6681-R2-1 | 5.10 | 2.76 | −1.63 | 6.93 | −1.55 | 1.43 | −1.17 | −3.04 |
| 6683-R5-1 | 26.81 | 6.23 | 10.02 | 25.16 | 5.08 | 6.03 | 4.31 | −1.39 |
| 6752-R5-2 | 7.39 | 3.11 | −1.67 | 8.79 | −7.01 | 1.18 | −1.03 | −7.01 |
| 6803-R5-2 | 9.14 | 18.88 | 1.50 | 18.71 | 1.83 | 1.99 | 1.71 | −11.71 |
| 6864-R4-1 | 2.95 | 1.88 | 1.78 | 42.80 | −1.50 | 2.10 | 1.47 | −1.50 |
| 6872-L5-1 | 1.59 | 6.06 | −1.96 | −1.96 | 3.74 | −1.96 | −1.96 | −1.96 |
| 6906-L5-1 | 14.47 | 3.55 | 1.13 | 12.00 | −2.17 | 2.01 | 1.54 | −2.17 |
| 6930-R5-1 | 22.64 | 6.91 | −1.19 | 14.99 | 1.28 | 1.74 | 1.04 | −10.13 |
| 7631-L3-2 | 3.13 | 5.17 | 1.30 | 8.27 | −2.68 | 1.40 | 1.50 | −2.68 |
| 7764-R3-2 | 12.47 | 4.37 | −1.09 | 11.00 | −3.64 | 1.53 | 1.54 | −3.64 |
| 7849-L2-2 | 1.71 | −1.05 | −2.04 | −2.04 | −2.04 | −1.29 | −2.04 | −2.04 |
| 8316-R5-1 | 66.20 | 16.64 | 2.12 | 60.43 | 6.75 | 3.99 | 3.79 | −1.81 |
| 8433_C-R4-1 | 18.24 | 6.98 | −1.37 | 17.79 | 1.52 | 1.68 | 1.01 | −5.42 |
| 8433-L3-1 | 8.10 | 3.41 | −1.39 | 9.18 | −1.06 | 1.19 | 1.05 | −3.51 |
| 8452-L3-1 | −1.08 | −1.08 | −1.08 | −1.08 | −1.08 | −1.08 | −1.08 | −1.08 |
| 8724-R5-2 | 6.87 | 3.34 | −1.55 | 7.87 | 1.04 | 1.14 | −1.14 | −9.03 |
| 8746-R5-1 | 1.49 | 1.68 | 1.04 | −2.03 | 4.06 | −2.03 | −2.03 | −2.03 |
| 8808-R5-1 | 12.95 | 5.01 | 1.08 | 13.67 | 1.70 | 1.57 | 1.02 | −4.54 |
| 8832-R5-1 | 4.44 | 3.33 | 2.34 | 19.28 | −1.37 | 3.13 | 3.30 | −1.37 |
| 8879-L5-1 | −1.79 | −1.07 | −1.79 | −1.79 | 4.14 | −1.79 | −1.79 | −1.79 |
| 9485-L5-1 | 3.66 | 4.65 | −1.18 | 11.90 | −3.02 | 1.00 | −1.56 | −3.02 |
| 9507-L5-1 | 8.15 | 1.99 | 2.56 | 14.45 | −1.45 | 2.84 | 1.67 | −1.45 |
| 9798-L5-1 | 1.77 | 4.26 | −1.40 | −1.40 | 10.93 | −1.40 | −1.40 | −1.40 |
| 999996-L4-1 | 1.23 | −1.40 | −1.10 | −4.63 | 5.08 | −1.06 | −2.07 | −1.67 |
| 999999-R4-1 | 1.60 | 1.32 | −2.72 | 3.99 | −7.30 | −1.89 | −2.94 | −23.66 |
| miR-103 | 1.28 | −1.00 | 1.19 | 1.66 | 1.80 | 3.59 | 1.79 | 12.88 |
| miR-1202 | 6.96 | 2.14 | −2.10 | 7.21 | 1.01 | −1.32 | −1.79 | −7.52 |
| miR-1249 | 1.49 | −1.12 | 1.02 | −2.26 | 4.17 | 1.10 | −2.26 | −2.26 |
| miR-1275 | 9.83 | 7.58 | −2.54 | 20.69 | −1.44 | −1.20 | −1.52 | −12.61 |
| miR-129-3p | −1.00 | −1.00 | −1.00 | −1.00 | −1.00 | −1.00 | −1.00 | 31.72 |
| miR-1321 | 8.17 | 2.93 | 1.49 | 6.53 | −2.14 | 1.63 | −2.14 | −2.14 |
| miR-1323 | 4.63 | 4.00 | 1.86 | 8.00 | 4.21 | 3.41 | 1.75 | −3.13 |
| miR-141 | −1.96 | −1.96 | 1.49 | −1.96 | 1.83 | 3.28 | 3.22 | 16.77 |
| miR-143 | −4.11 | 4.76 | −4.11 | −4.11 | 4.40 | −4.11 | −4.11 | 7.28 |
| miR-182 | −1.00 | 3.30 | 2.12 | −1.00 | −1.00 | 4.01 | 7.56 | 30.62 |
| miR-183 | −1.00 | 1.85 | −1.00 | −1.00 | −1.00 | 3.52 | 2.83 | 25.18 |
| miR-198 | 21.91 | 7.44 | −1.47 | 19.01 | 1.51 | 1.52 | 1.17 | −4.73 |
| miR-19a | −1.04 | 1.14 | 1.68 | 4.45 | −1.76 | 3.38 | 2.05 | −1.76 |
| miR-30c-1* | 22.43 | 8.60 | −1.36 | 21.06 | 1.72 | 1.31 | −1.01 | −8.25 |
| miR-375 | −1.60 | −1.60 | 1.32 | −1.60 | −1.60 | 10.44 | 12.39 | 58.80 |
| miR-376c | −1.12 | −1.12 | 2.50 | −1.12 | −1.12 | 15.41 | −1.12 | 170.06 |
| miR-429 | −1.00 | −1.00 | −1.00 | −1.00 | −1.00 | 3.48 | 1.76 | 17.65 |
| miR-483-5p | 9.82 | 7.11 | 1.75 | 52.02 | 2.12 | 1.94 | 1.66 | −3.38 |
| miR-516a- | 9.91 | 4.22 | 2.90 | 39.38 | 5.18 | 4.21 | 3.86 | −1.65 |
| 5p | | | | | | | | |
| miR-7 | −1.00 | −1.00 | −1.00 | −1.00 | −1.00 | 11.46 | 7.18 | 321.94 |

TABLE 22
Chromosomal locations and pre-microRNA sequences for target RNAs in Tables 18 to 21.

| Gene | Chr location | Pre-microRNA sequence | SEQ ID NO |
|---|---|---|---|
| 10083-L5-1 | 14q12 | GGGTGGAGAGAGGGGGTAGAAAGGAAGAGGGACATATGGGAGCCTCTTCCCCCATGCCCGAAAGCTTCTCCCATTT | 1211 |
| 10233-R5-1 | 9q34.13 | ACCTTCTGCCTTTGAGACCTGGAAGCCACAGCACTGGTGGACATAAATTCTACTGCCTGCTGCTCCAGATCCAAGGGGAGAGGGT | 1212 |
| 10335-L5-2 | 15q26.1 | TCTTAGTGCTTTCTAATTAAAAAGGAGGGGAGTGGTGATCTTTTTGCTCTCTAAGTTCTGTTTCCTCTGAGTGGAAAGCAGAGGG | 1213 |
| 10357-R5-1 | 3p25.3 | CTCTCTCTTGCTGAACTCTGTGTCCAGGGTTCTCTAGCCCTCTAGGGAAACAAACACATGGAATATTCAGACAGTGGAGAG | 1214 |
| 10455-L5-1 | 17q23.2 | GGAGAGGGATGTTTGGCGCAATTGCAGTTGTTAAAATAGAACAGGCTTCTGAATTGTGGCCAGAACATAATGAATCCCATTTCT | 1215 |
| 10520-L5-1 | 3p23 | AGTCCACAGAGAAGGCTGGAGGAGGTAGCAAGGAGATGCTGTAACAGCTGCTACAGCCTTAAAACAAAGTTGGTGTCTCTCTGGACT | 1216 |
| 10844-R4-1 | 8p12 | GGGTGGGTGGCAGATGTCTTACTCTGCCTTTTAGAAACACATGTTTGAAAGTAGAGTCCTGAATATGCTACCCCCT | 1217 |
| 11358-R5-2 | 1q23.3 | GTGAGAGGGTAAAGTAGTATGCTGTGGGTCAGAATTACTAGGGAAGTTCTGAGCCATGTCAGCCTAGTTTCCCACCCTCCAT | 1218 |
| 11444-L5-3 | 15q22.2 | GAATAGTTGGAAGGTCACCTTTGCTGGAGGAGTGGGTGCCTGAACACAAGTGCAGTCCTATTAGTAAGCCAGGACCTTCAGCTCCTCAGTTGA | 1219 |
| | | AAGGGAAATAACTATTC | |
| 11547-R4-1 | 6p12.2 | TGCCAGCCCTGCTGTAGCTGGTTGAAGGGGACCAAACCTCTCAGGAAGACGGACTTGGTTCCGTTTGACCAGCCAGAGCAGGGGGCA | 1220 |
| 11605-L5-4 | 1p31.3 | GGCCCTGTGCATAATAAATCTTTATGGAATTGAGGGGAAGGGAATTAAAGAAGGGAAGAGAAGAGCAAACCCACTACAGAGTTTATGA | 1221 |
| | | CCATCTATTCTTAATATTATATTAGAACTGGGCC | |
| 11688-R5-3 | 11q13.4 | CGCCCACTAAACCGGATGTGACGTTGACCTACCTTAGTCACATTGTTAGGGAAGGAAGTGTGCCGCGCCTACCTATCTGCCCCGCCTT | 1222 |
| | | GAGTCTCAGCCAGTCGGCGTCTCCATCCTGGCG | |
| 12699-R5-2 | 1q22 | CTGGGACGGGCGGGGCGCCGAGGCCCAGGGCGCCTGAGGGGCGCAGAGGTGTCAGCGTGCAACCGCCGCCCCCCAGCGTTCCCG | 1223 |
| | | CCACCACCGCCACCACCCTCAAAGCCCGG | |
| 12707-L5-2 | 7q32.1, 17q23.2 | GATTGTAGAGTTGTTGGATTGCAGAGGAGAATGTTCGATTCATCTTTTCAGTAACTTTAAAATC | 1224 |
| 12729-R5-1 | 17q25.3 | AAATTAAAGAAAAAAAATTCTCCACCAAAAGCGCCGCAGTGACAGTTCCCAACATTTTCTGCCTTTCTTCTTCCCCTCCCTGCACCACTA | 1225 |
| | | GGAGGGAGAAGGCACACAATTGCATTTTCGTCGCTTTTTAATTTTTTTTTTTTGGTTT | |
| 12730-R5-1 | 17q25.3 | CCCGGCTCGGCCCCGCGTCTCTCCAGCTCCTCCGGCTCCTTTTAGTGCATAAATTAGTGATGGCATTTCCCGGAGAGCGGAGCACAA | 1226 |
| | | CACAGGGCGCCGGGCTCGGG | |
| 12888-L5-2 | 2q32.3 | TCCTCCAGGAGCTGGGAGAACCATACAATGTAGGAAAAATATAGTTTAATTGAATGGTACTCTGGTCTTCTGGAGGA | 1227 |
| 12907-L5-1 | 17q12 | GGCTCAGTGTCTAGGACGTGGTAGAGAGGGCATGAGCACAGTGGAAGCAAAAATGCCAGTTCAGTGCTTAGTGCTGACTTTACCACC | 1228 |
| | | GTTCTTCATGGCAACTGAACT | |
| 12912-L5-2 | 1p36.33 | CCCACCTACAGCCTCTGTGGGTGGAAGGTGCCAGAAAACTTGAAGAGTGGCTCTGGCCAGCTCTCTGGGCCCAGTTGGCACCAGGTG | 1229 |
| | | GTTGCAGAGAAAGGGTGGG | |
| 12917-R5-2 | 1p34.1 | GGACCTGGGGGCTTCTCTGACCCTTGAACAGCTTATACTATGAGACCTTGGGAACCTCCTCCATGCAGACACACAAGGCTCAATGTTG | 1230 |
| | | GGGGAAGGGAAGGGCCCATAGGTCC | |
| 12947-L5-4 | 6p21.1 | GCCTTGTCTGAAGGGAGAGGCCCTGGCATGCGGATGGGAGATTTAGAGGCTGTGGAGAAGGGAACTTGGGGCTTTCCTTCCTTCGTG | 1231 |
| | | GCCTCACTCCCCTGGGGCCTCTCTCTATGGAGGGGGC | |
| 12958-R5-1 | 6q23.3 | GTTAGGGCCTGGAATCCCTCTGTCGGGCATCTGTTAGAGTCTGTGGATGGCACTCTGTAGTCGTTATAGATGCACCCAGGGGAAGATT | 1232 |
| | | CTCTCAGGCATGAT | |
| 12974-R5-2 | Xq27.3 | ATTCTCTGCATGTTTACCTTGTTCTCTCTGTTGTTTTGGTGTTAAAAGTTAAATAACTCTGAACCAAGGGACTAGGAATTTGGGGGCACA | 1233 |
| | | GAGGGT | |
| 12979-R5-2 | 3p21.1 | TTTGGGTCCTTTGTCCAGAGTGTGAGGATGTTGGTGAAGGCCATGCCCTGACTAGATTCAGGGATCCTTTTCTTTCATCTAGCTACTGG | 1234 |
| | | GGAAGGACCTGGA | |
| 12992-L5-1 | 9q31.3 | TAGAGATGGGGGTGGAGGGAAGCAGGTATGATTTCAGGGGCAGCAGGAGATTCTCTTCTGTTTCCCTCTCTCCCAGCTCTA | 1235 |
| 13001-L5-1 | 12q13.13 | TGGAGCTGGGAGTGGTATCTAGGAATTTCTCCTTCTAGTTTTTACCTTCTTAGTTTTA | 1236 |
| 13053-R5-4 | 19q13.33 | ACCCATCTGTAAAGTGGGACAATCTTCTTGCCTCCTAGGATGGCCATGGAGCTCAGTGCAGGGGTTGGGGCTGCCTGATGAGCCTGA | 1237 |
| | | TCTTAGGGAAGGC | |
| 13070-R5-3 | 5q35.1 | CTGCTCTCCTTGACCTGGTAGGAAGGTGATTTGATGGTTTTCAAACACATGCTGTTTCTCTCTTTCATCAGGGTAGCTGGGTGGGTGGC | 1238 |
| | | ATTAGGTCCTTTGGACTGGGGAGAGGAGACAG | |
| 13071-L5-3 | 7p22.3 | TACATGTGCCGAGATGTGAGCAGTCACCCCTGGAGATCCTCACCCCTTCTCTGTAGAACGAGGAGTTGGGCTGCCAGGGATTGGGGT | 1239 |
| | | CTGGGCGCGTTGCTGGTGTGTGTG | |
| 13078-L5-1 | 2p13.1 | TCTCCTGTCTAGCAGGCTTATGAAATGAGGGCCCATCCTTTGGTCAAGGCTTGTTTGAAGGAGA | 1240 |
| 13098-L5-1 | 11q24.1 | ACCCCCCGGAGGAACCGCCAACAGCGCCCCGGCACCATCAAGCATGGATCGGCGCTGGACGTGCTCCTCTCCATGGGGT | 1241 |
| 13122-L5-1 | 2p11.2 | GGACTGGAGCAGGTGAGATGGAATTTCCTAAAGGTCCAGATATTTAGGACCCTGGACCCATCTCACCCGCTGCCTCTGTCC | 1242 |
| 13185-L5-3 | 3q13.31 | GGGGAAGAAGAGCAAAGAGGGGAGAGAGGGAAGAAAAAAAACAGAATAAGTTGGTCGTATTGAAGCTTCTCCATCAACCCTAGAACAA | 1243 |
| | | TTAGCTTCCACC | |
| 13216-R5-2 | 1p21.1 | TGAGTAAATAATCTTCAAATGTATGGCTTTTTATTCCTGGTGAGAGCATCATACTGAGAGAAACAGTGCTTCAGCTGCCAGAGAGGAGA | 1243 |
| | | AAGGAGGAATATATAGAAACATCCAAACTT | |
| 13219-L5-1 | 11q22.1 | GCTGGAGCAGAGAGACTGAGTGAGGGAGTCAGAGAGTTAAGAGAATTAGTACAGGTGAGATTGTACTGATTATCTTAACTCTCTGACC | 1245 |
| | | CCCTCACTCAGTAAAGATCAGATTGTGCCAGGC | |
| 13225-L5-1 | 11q23.3 | GAAGATGGAAGGGGCTGTCCCAGAAGTGGGCAGGAAGAACCAGGCTGTTATGCCATGTGGGCATGTGGCACAACAGCCTCGTTCTTC | 1246 |
| | | CTGCCCACTTCTGGGGCACCTTGTTTCCCTCT | |
| 13235-R5-1 | 11p11.2 | CTTTCTGCTTGGCTGTTATATGAACCTGCCCTGGGCTTTCTAGTCTCAGCTCTCCTGACCAGCTGAGCTGGAGGAGAGCTGAGACTAG | 1247 |
| | | AAAGCCCAGGGCAGGTCCAACTGAAAA | |
| 13245-L5-4 | 1q24.1 | AAGACATTACTTTGAATATATTTTAAAGGGAGTAGAAGGGAAAGACTATTTGGAATGCTTTATTAAAATAGTCTTTCCCTTCTACTCCTTT | 1248 |
| | | TAAAATATATTCAAAGAAAGTT | |
| 13252-L5-3 | 1q25.2 | CTTTGGCACAGTCCGTGCTCTCAAGGAGCTCACAGTCAGGAAGGCACGTGGAATTTCAGCCTGGAGTTCCAAGTGCTGCCCTCAGGG | 1249 |
| | | AGTGCTGGGCCTGAGCTGGGGTGAGGCTGCAGGG | |
| 13254-R5-1 | 1q25.3 | CTCACACATGGTACGTTTTCAATGAGCTGATTTTGTTTCTCCACTCAATGCAGTAATTGAGCTTCTTTGGTTCAGTGCATGAGTGGTTCA | 1250 |
| | | GTGGTTCATTGGGCATCCTGGTTGAGGG | |
| 13274-L5-3 | 12q13.13 | AGGTGGTGGTGGGGAGGACCCTGAGGGAGGGTGGGAGCACGGGAGAAGAGAAGGCATACCCAACCTGACCTACTTACCTGTCCCCT | 1251 |
| | | ACCCCACAGAGGGCTTCCCTGGAGGCCGCCATTGC | |
| 13300-L5-1 | 14q24.2 | GGGTAAGTAGGAGGGGAGATAATTCTGTGTGTAACTCACAACCCTTCTGCCCTTTTATCTCTGGGGCCCGAATTTCCATGTGGGGGAT | 1252 |
| | | AAAAGAAGTCACCCTTCCTCATCCCCC | |
| 13309-R5-1 | 1p32.2 | ATAGATTTACACTCCCTGTCCTCCACAAGCTCACAGAAAAATTGTAGCTGAAGACAAGGGGGAAGAACCTA | 1253 |
| 13352-R5-1 | 19q12 | CACTTTTTATGACATCACATTGTTGACCTCAATCTGAGGAGATGGGGGAGCTAGCCCCATTTCACAGATGCAGCGCTGAGGTTCCGGG | 1254 |
| | | ATGTGAGGTGAGGTGA | |
| 13357-L5-4 | 19q13.2 | TCAGGGTTTGGTGTACAATTGTGGGAGGCTGCAGGGAGGTGTGGGGAGAAGGTCCGCTTTAGAGCTTGGTCCCTCTGTGCTCACCTC | 1255 |
| | | CCAGCCCCAAGCCCCCAGCACCGGATCCTG | |
| 13366-R5-3 | 19p13.2 | GGGCCGGTGAAGGCCCCGCCTGGGTCCCATACCCGGGGTTGGGGGTCAGAAGCCGCTCGGTCTCTGTGGGAATAGGAGAGGGCAC | 1256 |
| | | TGGGGTGAGGCCTG | |
| 13373-R5-2 | 20q13.33 | TCCCTGCACCCCTGCCTGTACAGGTGAGTGGGAGCCGGTGGGGCTGGAGTAAGGGCACGCCCGGGGCTGCCCCACCTGCTGACCA | 1257 |
| | | CCCTCCCCCCACAGCACCCTGTGCCGGGGC | |
| 13375-R5-4 | 20q13.33 | ACCCTCTCAGGACCCCTCCTAAGGGGTAGGCAGGGGCTGGGGTTTCAGGTTCTCAGTCAGAACCTTGGCCCCTCTCCCCAGACCCCC | 1258 |
| | | AGGCTGTGGTGAGGGTCTGAGAGCTGGTAC | |
| 13398-R5-4 | 2q35 | ATCCTCATTCATTCACAGGAGACCTACCGCAGAAGAGACCCTAGAACATCCTTGGTTCAAAGTGAGTCTAGTCTGCAAAGTGGTGGCA | 1259 |
| | | CAAAAGGTGGAGGGAGAGAGAA | |
| 13417-R5-4 | 3q13.2 | CCATGATTCCTTTAACAACATGTTTCCAGCATTCCCAGGTAGGCCAAGGTGTCCTACAGAAAAACCTTGGGTTAGACCTACAGGGGATC | 1260 |
| | | TGGCTGGTGTTAACAGAAGGAAGGGCA | |
| 13436-L5-1 | 3p12.1 | GAGGCATGACCTAGCTGGGGGCTTCATTGAGCTGTGGTCACCGGAGCTCAGAGGCTGCTCCTCCTAGGCACCCTAGCTCTTAGGACT | 1261 |
| | | CAGTTCTCTGAAGCTCACCAAGGGCATCTATCTT | |
| 13467-L5-1 | 5q35.2 | TTTGACTTGGAGCAAGGAGGGTCTGACTGTCACTTGGAGCTAAACCAGTCTCCAAGTGGCCATCAGACCCTCTTTGCCCCAAGTCAGT | 1262 |
| 13468-L5-1 | 5q35.2 | GACTTGGGGCAAAGAGGGTCTGATGGCCACTTGGAGACTGGTTTAGCTCCAAGTGACAGTCAGACCCTCCTTGCTCCAAGTCAA | 1263 |
| 13470-R5-1 | 5q13.2 | GGTCAGTCTAGCTTGCTCTTGAAGCTCTCCAGAGACAAAGAAGCCTGTAGCAAATCACAATGAGGATTCTGGTCCCTGAGGTGGAGAG | 1264 |
| | | GGTGGGAGCCCCACTGTTTGCCC | |
| 13473-L5-3 | 5q13.3 | TATATAGAGAGACATATGTATCAGGATAGGTGGTAGAAGGGCAAACATAGAAAACACCACCCTAGCCAGGTTGCCCTGAATGGCCCCA | 1265 |
| | | GTGTCTAGCATAGTGCTTTATG | |
| 13500-L5-3 | 7q32.3 | CTGGTGTGGACCTCACTCAATGGAGAGAGAGGCCTGGAAGATCTTGGAACAGGAACATCCAGCCCTGCTTCTCTCTTAATCTCAGCCC | 1266 |
| | | ACACTCAGAG | |
| 13522-L5-4 | 8p21.1 | AGTGCAGTGGTGTGATCATAGCCAATAGAGGGTGCACAGGCACGGGAGCTCAGGTGAGGCAGGGAGCTGAGCTCACCTGACCTCCC | 1267 |
| | | ATGCCTGTGCACCCTCTATTATATCACTCGTAT | |
| 13523-R5-1 | 8p12 | GGCCATAGCTGCTGGGTCCCTAAGGCACCTCTCATCAGTTAGGTCAATGTGCCAGGCAGGGGAAGAAGCCTTACTATTCCACTGCATC | 1268 |
| | | TGTGGCCT | |
| 13545-L5-1 | Xq28 | CCCCAGACTCACAGCCTCCCTTGCGCCACAGGCCTGTGTCCTGACTGGGACTCTTGGGACGCCAGCAAGCCCGTTACCAATGCGCGA | 1269 |
| | | GAGGCCATGCAGCAGGCGGATGACTGGCTGGGCA | |
| 227-L5-1 | 3q27.2 | TGAGGGGCGGAAGCACTGGGGAGAGACAGGTGTGAGCTTCCCACGTGGTGATCAGCTCACACCTGTCTTGTGTTCTTGGTATTCACA | 1270 |
| | | GACTCTCA | |
| 3744-R5-1 | 19p13.12 | CTTCTCTTATTCTCCCTGTTTTCATCCTACTTTTAAGTAATAAATTTGGCATTAGTGGGAGGGGAGCAGGGAGGAAGGAGAAG | 1271 |
| 3875-R5-2 | 5p15.1 | GGCTCGGTTTCAAATCTCTCCTAATCCACTAATGAACCTTTATTAAAGTGGGAGAGAGAGGTTGAATCAGTC | 1272 |
| 3923-R5-1 | 19p12 | GGCTCTGCACCAGGCGTTTCTTCTTGTGTTTCCTCTTCTCTTCTGGAGAGGGATGAAGGAGATCCTTTGTGAGAGGC | 1273 |
| 3926-L5-1 | 3q27.3 | AGTGGGGGCACGTTCAAGAATGCTAATGAATTATCAGTTTTCTTTAAGCCTCATTAGATTTCTTGATAGCAAAACCTCCCATT | 1274 |
| 3992-R5-1 | 2p22.3 | GTCTCTGGCTTCTGTTTCTTATGCTGCTGTTGATTTTTTCCAACCATCAGCTCAGATACTGACAGAAGAGAAAGGGGC | 1275 |
| 4203-R3-2 | 11q23.3 | AGCAATTCCAACTGCCCCATTTATATTCCTAAGTAGAGGACTTGTTAATATGGAGCCTGCCTCTGGGGAAGTGGGAATGTGCT | 1276 |
| 4261-R5-1 | 1q23.3 | GTAAATTTCAACCTATTTTTAAGGGTTATTTTCACTCAAGTGAAATCTATCAAGGAAGGAGGGTTATTTTTAC | 1277 |
| 4291-R5-1 | 3p14.3 | GGTTAAAATGGATTGCCAGGAAACACCTGAAGGGTACAAAGTCATGTACACCCCCATGGCTCCTGGTAACTACCTGATC | 1278 |
| 4440-L3-2* | 11q14.1 | CATGTGATTTCTGCCCAGTGCTCTGAATGTCAAAGTGAAGAAATTCAATGAAGCACGGGTAAACGGCGGGAGTAACTATG | 1279 |
| 4440-L3-2* | 7q11.22 | GTGATGTGATTTCTGCCCAGTGCTCTGAATGTCAAACTGAAGAAATTCAGTGAAATGCGGGTAAACGGCGGGAGTAACTATGAC | 1280 |
| 4479-R3-1 | 1p32.3 | CCCAAGCTCCTTCCTGGAGGACTTAACACTGTGTTGAGCAGTTGTTTTGAATTTCCGGGCAGGGGGCTGCAAAAGGG | 1281 |
| 4790-L5-2 | 2q11.2, 2q14.1 | CCCAGAATTCTAGTAATGAGGGAGACAGGTTATGCCAAGCCTGCTTCTCCCAGGATGCACTGGGAGCCTGGG | 1282 |
| 4958-L5-1 | 6p21.1 | CCCCATTTTCAGAAGATGCCATGGTTTATTAATTCTCTGCAGAAGCAATAAGAACTGGGTATTGGCTTAATTTGGGG | 1283 |
| 4988-R5-2 | 14q24.3 | CTTTTTCTCTCTGCTGGGAAACCTTGCTTGACTTCATGTCCAGTGTTTGGTATCCAAAGACGGGGAGGAGGAG | 1284 |
| 5080-R3-1 | 11q23.3 | GGCGTTTCTTCTTGTGTTTCCTCTTCTCCTTTTCTGGAGAGGGATGAAGGAGACCCTTTGCAAGAGGCATGTT | 1285 |
| 5108-R5-2 | 2p13.1 | CCAATGCCTCTCACCTCCTCACTTGTGGCACCTTCGCTTTTGATCCGAAGTGCGGGGTTATTGTGAGTGACGGTGTGGGAGGAGAGGG | 1286 |
| 5232-L5-2 | 9q21.13, 1q23.2 | GGAGCCCTTGATGTCCTGCAAATGAAGGAGGAGGATGTCCTTAAGTTCCTTGCAGCAGGAACCCACTTAGGTGGCACC | 1287 |
| 5392-R5-1 | 2q24.2 | CTCTCTCTCTCAGTTACTCACAAAACATGGCTGTCTTATTCAGAGATTAGCAATTATTGTAATGAGATACTGTCGGAGAGGG | 1288 |
| 5723-R5-1 | 4p15.31 | CCTCTGCCTGGCTTTCTTTGTAAAGCCATTAAACTACATTAAGAAGGCTACTGCTGGAGAAAGGGGAGGAGG | 1289 |
| 5836-L5-1 | 11q23.2 | GCCATGGGCCTCCATAGTTTCCTGTAGCCCCCTTGGTTCCCAAGAATAGTTTTGGAATGGGGCGTGCTGTGATAATGGGGGTTAATGGT | 1290 |
| 5842-R5-1 | 1p33 | GGCCACTTGGGTGCATTGGACTTGAACTTCTTTTTTGTCTCCCCTTTAGGGGGGATATAGATTTTCATTTCTCTTTCATAACGGGCC | 1291 |
| 6037-R3-2 | 16q21 | GCAGGATCCCTCTTTTCATCTGAAAATTACCACTAATTTGCAATTAGTTGGAGGAAAATTGGAGATGGAGGAAAGGGAATTGC | 1292 |
| 6181-L5-1 | 1q41, 5q23.1 | AAATCCAGGGGGAAGAGTCATCTAAGTTTACCATGCAGTTGTTTACCAAAAATAGAGGAGGAGAGTCTTAACTTTTGCTCTTGGATTT | 1293 |
| 6216-L1-1 | 11q14.1 | CATGTGATTTCTGCCCAGTGCTCTGAATGTCAAAGTGAAGAAATTCAATGAAGCACGGGTAAACGGCGGGAGTAACTATG | 1294 |
| 6233-L5-2 | 6q16.2 | GGAAATGGGAGAAGGATAAAGTGGAAATCTAATTTTGAGAAATAAGGATTAAAGGTTCCATTATTCATGCTGTTTTC | 1295 |
| 6235-R5-2 | 15q26.2 | TCTGTTTTTATCAGTTTAATATATGATACATCTTCTATCCAAGGACAATATATTAAATGGATTTTTGGAGGAGA | 1296 |
| 6395-L5-1 | 14q11.2 | GTTCCGAGGCAGGCTTTCCTCCTCTCTGCAGGGGAGAGGCTCCCTCACACAAGAGGAGGATTACACTGGCTCTGAGC | 1297 |
| 6405-R5-1 | 8q21.11 | TCAAATGAGAAACTAAGTACATTTCTTTTCAACAGGCAATTTACCCCATGATGAGATATGCTTTCACTTATTTTTCTTTGA | 1298 |
| 6474-L5-1 | 1p34.1 | GGTGAAGGGGGAAGAGGGGATGGCTTTAATTAGGGCTTCTTGGCCTCGTCAGTCCTGGGGTTGGTCGGGGTAATCCAGTTAGAGTCC | 1299 |
| | | CAGCCTTTCATCTCAGCTGGCC | |
| 6602-R3-1 | 3p14.1 | CAGAGTCTAAATGGAAGAGTCCTCCGTATTTACCCAGCTCATCTCCTGTGTAATGGATTTGGAGGAGAGATTTCCACTGGGGCTCTG | 1300 |
| 6681-R2-1 | 11q12.2 | TGTGCTCTCATTGTTATTCCAAAAGTCTCTGTCTAGATCACTGGAGGGGCAGAGAGAGAGGGGAGAAAACAGGGAGATACA | 1301 |
| 6683-R5-1 | 12q23.2 | GTTCTAGTTCCAGGATGCTGATACTTTAAGCCCGAGGCTCTAACTTGAGCAGGAAGAGTTTATTTTGGGATGAAGAAT | 1302 |
| 6752-R5-2 | Xq13.1 | CCCTCCCAGTTCCCATAGCAACTGGGCTGTAGCAGCCAGAACTTGATTGAGCCCAGCAGTGGCCCGACTGAGGTGGGGAAAGGAGGG | 1303 |
| 6803-R5-2 | 22q12.3 | GCCACCTTTCATGGTGAGGATGCCTGCCACCTTCAGGATCACATCTTTGGGTGAGGTCCAACCAGAGAGGGAGC | 1304 |
| 6864-R4-1 | 3q26.2 | ATCTGTGTTTGGCTACAGGTGGGCACTCTAAGGGGTCAGTCTCCAGGGGAGTGTAATTGTGTGTCTCCTGGGGCTTGTTTGCAGAATG | 1305 |
| | | ACCTAAAGCTGAAGCCCCAGCT | |
| 6872-L5-1 | 2q37.2 | CCCCACCGGGTCACAGACTGTGACAGAGTCTTATTGCCTGTCTCTGGGAATTCATTTTCTGTCTCTCCTCTGTTCCACCTCTCTGGGG | 1306 |
| 6906-L5-1 | 6p21.1 | CCAGGAGAGCTGGCTGGTTGGGGAGAAGACACTAACCCTGTGAGTCTGACCTCAGCCAGCTAACCTGCCCTGG | 1307 |
| 6930-R5-1 | 9p21.3 | TGTCATTTGTCCATTTTCTCTTCTGACCCAGTGGTATTCTGCAAGATCAGAGGGGAGAGAAGGATTAATGTCA | 1308 |
| 7426-L5-1 | 2q22.3 | AAATCAAGCACAGCAGGAGGTGTTCGTCTCCCAGGTAATGGGTAAATGATGAGCAGATGAGCCATCCTTCTATTGATTT | 1309 |
| 7631-L3-2 | 1q23.3 | GTGGCGATTGGGCAGGCTTCATGCAGGCAGCTGGCGTCTAGGGCTGTCAGACGCAATCAGTGTTTGCATGGCACCTGCGGCCAC | 1310 |
| 7726-R3-2 | 1q21.3, 12p13.32, 1q32.1 | CATTTCACATCCATGAAGTAGGAATTGGGGCTCTGCACCAGGCGTTTCTTCTTGTGTTTCCTCTTCTCCTCTTCTGGAGAGGGATG | 1311 |
| 7764-R3-2 | 5q11.2 | TGCTATCTCGCCTCACACATCAACACACGTGCCAGACAGATTCTGACTGCAAAGTCTGTTATTGGTGATGAGAGAGGCAGAGAGGGCA | 1312 |
| 7849-L2-2 | 16p13.2 | CATCCCATGGTGTGCCCCCAAACATCTTATTTGTCTTGATATTTCTTTCACAGAAATACATATGACAGATAAGGAGTCACTAGAGGATG | 1313 |
| 8004-R3-2 | Xq28 | GGGGCTGCCATCCTGCTGTCCGTCATCTGTGTGGTGCTGGTCACGGCCTTCAATGACTGGAGCAAGGAGAAGCAGTTCC | 1314 |
| 8316-R5-1 | 14q24.3 | GTCAGGCTGCTGTATTCTCTTACACAGATGCCAGTAAGAACAAAGGCATCACGTGGGGAGAGGATACCCTGAT | 1315 |
| 836-R5-2 | 3q26.2 | AAATAAGCCATTCCAAACCATTCTCTGATTTGCTGTGAGTGGCAGAATCATTCACCGTGGTGAATCATAGCAGGGAGAACCATTTGGAA | 1316 |
| | | TGATTATTT | |
| 8433_C-R4-1 | 17q25.3 | AAATTAAAGAAAAAAAATTCTCCACCAAAAGCGCCGCAGTGACAGTTCCCAACATTTTCTGCCTTTCTTCTTCCCCTCCCTGCACCACTA | 1317 |
| | | GGAGGGAGAAGGCACACAATTGCATTTTCGTCGCTTTTTAATTTTTTTTTTTTGGTTT | |
| 8433-L3-1 | 17q25.3 | CGGTGGAGGGAAAGGGGAAAGGAGCCATTTTCTGCTGCACATCAGTCAGTGCCTGCGCCCTCCCTCCCTCCGCCG | 1318 |
| 8452-L3-1 | 18q21.33 | TTCAACACCCCAGCCATGTATGTGGCCATCCAGGCCTTGCTGTCCCTGTAAGCCTCTGGCCATACCACTGGCATCGTGATGGA | 1319 |
| 8724-R5-2 | 15q23 | GGCCCAGAAGATGAAAAGCTGAAGTCCTTTCCCTTCCAGCTGAAGCCAGGTGTGATGCTGGCAGGGAGAGGTTCCAAGCTTGGCC | 1320 |
| 8746-R5-1 | 8p21.1 | TAAGGCAGGATGATTCGGGAAATGGACTATTTAAAGCAAGCTGCTTTGGACTTGAATACCCCCATCCTGCGCTTA | 1321 |
| 8808-R5-1 | 3p14.3 | CCGATTATGGCTTTCTTCTCCTGCCCTTTCAGTAGTGATTTGCAGAAACAGGCTGGGAGAAAGGGGTCTTTGG | 1322 |
| 8832-R5-1 | 9q33.2 | TTCTGAGATATGATCTGTTGGATTCTCTACTACCAAAGTGGGGGAAAAACAGGTGGTACTCCAGAA | 1323 |
| 8879-L5-1 | 11q13.1 | CCCCTGGGCTCTCGACCTGCGCCCCAGCCCCCAGTACCTCGTCCGGAGCACTGTGAGGGAGCTGCAGCAGGACTCAAGGCAGCCCA | 1324 |
| | | GGGG | |
| 9349-R5-2 | 21q22.11 | GGACACTCTGAACCCCAAGTGGAATTCCAACTGCCAGTTCTTCATCCGAGACCTGGAGCAGGAAGTCCTCTGCATCACTGTGTTC | 1325 |
| 9485-L5-1 | 11q23.3 | CTGGGAACAATGGGGCCATTGTGGGAGGATGGAGTGCAGCAGACTGCTGGCACAGCCAAGCGCACCACGGTGGGACCTCACCCAG | 1326 |
| 9507-L5-1 | 16q22.3 | GGTGTTTGGATGGATGAGGATGGTGGATGATGGATGAGGGAGACGGAGGATTCCCTTATTAAAGCATCAAATTCTTCCCTAAATATC | 1327 |
| 9594-R5-1 | 2q12.1 | TTCCAGCTATTTAGTAACTCTTCCAAAACACTGTCAGCACCCATGCTAGGATGCAGGGAGTGGGAAGGAAGTCTAAGTAGGGAA | 1328 |
| 9798-L5-1 | 5q12.3 | GTGCTTTTCTTTCCCCCCAAAGAAGTCATACCAGGTATATATAGAGAGATCTATAATGCCCTTCTGTTGGGGGAATGAAAGCAC | 1329 |
| 999996-L4-1 | 17q21.2 | GTCTTCCCCCAACCCACAGCACACACCTGACTCCTCCCTTCCAGGGAAAAGACCTCAGGGCTGCTGGTGAGTCAGAAATAGGAAGAC | 1330 |
| miR-103 | 20p13 | TTGTGCTTTCAGCTTCTTTACAGTGCTGCCTTGTAGCATTCAGGTCAAGCAGCATTGTACAGGGCTATGAAAGAACCA | 1331 |
| miR-103 | 5q35.1 | TACTGCCCTCGGCTTCTTTACAGTGCTGCCTTGTTGCATATGGATCAAGCAGCATTGTACAGGGCTATGAAGGCATTG | 1332 |
| miR-1202 | 6q25.3 | CCTGCTGCAGAGGTGCCAGCTGCAGTGGGGGAGGCACTGCCAGGGCTGCCCACTCTGCTTAGCCAGCAGGTGCCAAGAACAGG | 1333 |
| miR-1249 | 22q13.31 | GGGAGGAGGGAGGAGATGGGCCAAGTTCCCTCTGGCTGGAACGCCCTTCCCCCCCTTCTTCACCTG | 1334 |
| miR-1275 | 6p21.31 | CCTCTGTGAGAAAGGGTGTGGGGGAGAGGCTGTCTTGTGTCTGTAAGTATGCCAAACTTATTTTCCCCAAGGCAGAGGGA | 1335 |
| miR-129-3p | 11p11.2 | TGCCCTTCGCGAATCTTTTTGCGGTCTGGGCTTGCTGTACATAACTCAATAGCCGGAAGCCCTTACCCCAAAAAGCATTTGCGGAGGG | 1336 |
| | | CG | |
| miR-1321 | Xq21.2 | ACATTATGAAGCAAGTATTATTATCCCTGTTTTACAAATAAGGAAATAAACTCAGGGAGGTGAATGTGATCAAAGATAG | 1337 |
| miR-1323 | 19q13.41 | ACTGAGGTCCTCAAAACTGAGGGGCATTTTCTGTGGTTTGAAAGGAAAGTGCACCCAGTTTTGGGGATGTCAA | 1338 |
| miR-141 | 12p13.31 | CGGCCGGCCCTGGGTCCATCTTCCAGTACAGTGTTGGATGGTCTAATTGTGAAGCTCCTAACACTGTCTGGTAAAGATGGCTCCCGGG | 1339 |
| | | TGGGTTC | |
| miR-143 | 5q33.1 | GCGCAGCGCCCTGTCTCCCAGCCTGAGGTGCAGTGCTGCATCTCTGGTCAGTTGGGAGTCTGAGATGAAGCACTGTAGCTCAGGAAG | 1340 |
| | | AGAGAAGTTGTTCTGCAGC | |
| miR-182 | 7q32.2 | GAGCTGCTTGCCTCCCCCCGTTTTTGGCAATGGTAGAACTCACACTGGTGAGGTAACAGGATCCGGTGGTTCTAGACTTGCCAACTAT | 1341 |
| | | GGGGCGAGGACTCAGCCGGCAC | |
| miR-183 | 7q32.2 | CCGCAGAGTGTGACTCCTGTTCTGTGTATGGCACTGGTAGAATTCACTGTGAACAGTCTCAGTCAGTGAATTACCGAAGGGCCATAAA | 1342 |
| | | CAGAGCAGAGACAGATCCACGA | |
| miR-198 | 3q13.33 | TCATTGGTCCAGAGGGGAGATAGGTTCCTGTGATTTTTCCTTCTTCTCTATAGAATAAATGA | 1343 |
| miR-19a | 13q31.3 | GCAGTCCTCTGTTAGTTTTGCATAGTTGCACTACAAGAAGAATGTAGTTGTGCAAATCTATGCAAAACTGATGGTGGCCTGC | 1344 |
| miR-200a | 1p36.33 | CCGGGCCCCTGTGAGCATCTTACCGGACAGTGCTGGATTTCCCAGCTTGACTCTAACACTGTCTGGTAACGATGTTCAAAGGTGACCC | 1345 |
| | | GC | |
| miR-200b | 1p36.33 | CCAGCTCGGGCAGCCGTGGCCATCTTACTGGGCAGCATTGGATGGAGTCAGGTCTCTAATACTGCCTGGTAATGATGACGGCGGAGC | 1346 |
| | | CCTGCACG | |
| miR-200c | 12p13.31 | CCCTCGTCTTACCCAGCAGTGTTTGGGTGCGGTTGGGAGTCTCTAATACTGCCGGGTAATGATGGAGG | 1347 |
| miR-205 | 1q32.2 | AAAGATCCTCAGACAATCCATGTGCTTCTCTTGTCCTTCATTCCACCGGAGTCTGTCTCATACCCAACCAGATTTCAGTGGAGTGAAGT | 1348 |
| | | TCAGGAGGCATGGAGCTGACA | |
| miR-20b | Xq26.2 | AGTACCAAAGTGCTCATAGTGCAGGTAGTTTTGGCATGACTCTACTGTAGTATGGGCACTTCCAGTACT | 1349 |
| miR-21 | 17q23.1 | TGTCGGGTAGCTTATCAGACTGATGTTGACTGTTGAATCTCATGGCAACACCAGTCGATGGGCTGTCTGACA | 1350 |
| miR-298 | 20q13.32 | TCAGGTCTTCAGCAGAAGCAGGGAGGTTCTCCCAGTGGTTTTCCTTGACTGTGAGGAACTAGCCTGCTGCTTTGCTCAGGAGTGAGCT | 1351 |
| miR-30c-1* | 1p34.2 | ACCATGCTGTAGTGTGTGTAAACATCCTACACTCTCAGCTGTGAGCTCAAGGTGGCTGGGAGAGGGTTGTTTACTCCTTCTGCCATGGA | 1352 |
| miR-375 | 2q35 | CCCCGCGACGAGCCCCTCGCACAAACCGGACCTGAGCGTTTTGTTCGTTCGGCTCGCGTGAGGC | 1353 |
| miR-376c | 14q32.31 | AAAAGGTGGATATTCCTTCTATGTTTATGTTATTTATGGTTAAACATAGAGGAAATTCCACGTTTT | 1354 |
| miR-429 | 1p36.33 | CGCCGGCCGATGGGCGTCTTACCAGACATGGTTAGACCTGGCCCTCTGTCTAATACTGTCTGGTAAAACCGTCCATCCGCTGC | 1355 |
| miR-483-5p | 11p15.5 | GAGGGGGAAGACGGGAGGAAAGAAGGGAGTGGTTCCATCACGCCTCCTCACTCCTCTCCTCCCGTCTTCTCCTCTC | 1356 |
| miR-516a-5p | 19q13.41 | TCTCAGGTTGTGACCTTCTCGAGGAAAGAAGCACTTTCTGTTGTCTGAAAGAAAAGAAAGTGCTTCCTTTCAGAGGGTTACGGTTTGAGA | 1357 |
| miR-516a-5p | 19q13.41 | TCTCAGGCTGTGACCTTCTCGAGGAAAGAAGCACTTTCTGTTGTCTGAAAGAAAAGAAAGTGCTTCCTTTCAGAGGGTTACGGTTTGAGA | 1358 |
| miR-7 | 19p13.3 | AGATTAGAGTGGCTGTGGTCTAGTGCTGTGTGGAAGACTAGTGATTTTGTTGTTCTGATGTACTACGACAACAAGTCACAGCCGGCCTC | 1359 |
| | | ATAGCGCAGACTCCCTTCGAC | |
| miR-7 | 9q21.32 | TTGGATGTTGGCCTAGTTCTGTGTGGAAGACTAGTGATTTTGTTGTTTTTAGATAACTAAATCGACAACAAATCACAGTCTGCCATATGG | 1360 |
| | | CACAGGCCATGCCTCTACAG | |
| miR-7 | 15q26.1 | CTGGATACAGAGTGGACCGGCTGGCCCCATCTGGAAGACTAGTGATTTTGTTGTTGTCTTACTGCGCTCAACAACAAATCCCAGTCTAC | 1361 |
| | | CTAATGGTGCCAGCCATCGCA | |
| miR-720 | 3q26.1 | CCGGATCTCACACGGTGGTGTTAATATCTCGCTGGGGCCTCCAAAATGTTGTGCCCAGGGGTGTTAGAGAAAACACCACACTTTGAGA | 1362 |
| | | TGAATTAAGAGTCCTTTATTAG | |

TABLE 23
Target RNAs present at at least 5-fold decreased levels in at least 50% of tumor samples

| | | | | | | | | | |
|---|---|---|---|---|---|---|---|---|---|
| | | | % of | | | | | | |
| | | SEQ | down- | | | | | | |
| | | ID | ex- | | | | | | |
| Gene | Probe sequence | NO | pressed | ADK9 | ADK10 | Adk29 | Adk15 | Adk23 | ADK48 |

| | | | | | | | | | |
|---|---|---|---|---|---|---|---|---|---|
| 10010_B-L4-1 | GCCGAGCCCCCGCCCCCGCCGGGATGCTGCCCTCC | 1363 | 67 | −4.54 | −4.10 | −6.89 | −5.28 | −3.68 | −2.54 |
| | GGAAGGAGGGGCGCTGCCC | | | | | | | | |
| 10010_D-L4-1 | TGGCGCCCTCCCCCGCCCGGGGCTCAGCCTCTCAC | 1364 | 61 | −4.69 | −6.39 | −10.13 | −3.34 | −2.75 | −1.75 |
| | CTG | | | | | | | | |
| 10010-R2-2 | CTCGCCGGCTCCAAACTTTCCCCAACTCCAGG | 1365 | 67 | −10.92 | −10.92 | −7.27 | −7.12 | −4.44 | −2.95 |
| 10030-R5-1 | CCGTGGATGTCAACTCAGCTGCCTTCCGCC | 1366 | 67 | −6.81 | −6.81 | −6.81 | −2.13 | −3.82 | −2.13 |
| 10145-L5-2 | TCAAAAAATTCTTTTTCCTTTGCTCTCTCTTCTGT | 1367 | 56 | −2.03 | −2.03 | −2.03 | −2.03 | −1.18 | −2.03 |
| 10231-R3-1 | TGAACTTTAGCTGGGCCGCCGCCTGTCAGC | 1368 | 72 | −6.47 | −4.83 | −7.60 | −4.34 | −5.39 | −1.70 |
| 10260-L5-2 | ACCTATTGTTCGCCAGGGCCCCCACCCGATGT | 1369 | 67 | −13.31 | −13.31 | −3.91 | −3.96 | −6.75 | −4.01 |
| 10333-L5-1 | TGCCCTGCCCACCCCCTCCCCTGCCCCG | 1370 | 78 | −5.25 | −5.14 | −8.87 | −5.02 | −3.91 | −2.93 |
| 10342-R2-2 | CCCGCCGCCGGAGCATCTCGAAGTTAATTAAA | 1371 | 56 | −4.63 | −3.69 | −4.92 | −3.66 | −4.90 | −1.74 |
| 10345-R5-1 | ACCCTTCTCTCAAAAGCGACCCCTCCCATCCAGTCC | 1372 | 72 | −4.22 | −4.59 | −10.15 | −5.45 | −4.10 | −2.11 |
| 10374-R3-2 | GACACCGCCCGCTACTTTGTTAATGAAAAGCCCCC | 1373 | 67 | −33.82 | −4.71 | −10.79 | −4.92 | −11.40 | −1.26 |
| 10435-R5-1 | TGCTAATTGTGCCCTGTTGTCTTTCTTAAACT | 1374 | 56 | −2.03 | −2.03 | −2.03 | 1.07 | −1.10 | −2.03 |
| 10533-R5-2 | TAACTGTCCTGAGCCCCTTCTTTATATTGC | 1375 | 56 | −2.60 | −2.60 | −2.60 | −1.21 | −1.46 | −2.60 |
| 10543-R5-2 | GCCTTCACCCTTCCCATCCTGGCTCATGAAT | 1376 | 56 | −2.16 | −2.16 | −2.16 | −2.16 | −1.24 | −2.16 |
| 10578-R5-1 | CCACCCCCTCTACGGTCCCCACCAGCCCCG | 1377 | 78 | −5.22 | −4.46 | −6.46 | −4.96 | −4.51 | −1.76 |
| 10818-L5-1 | CTCAGTGATGACAAATGACCGCTGTCAGCCGCC | 1378 | 83 | −21.17 | −21.17 | −8.42 | −4.40 | −9.89 | −1.24 |
| 11370-L5-5 | CCCTCCGCCCCCACACTGCATCCTTGCCCAGTTTGG | 1379 | 78 | −6.80 | −4.03 | −7.05 | −3.30 | −2.15 | −2.30 |
| 11605-L5-4 | TCCCTTCTTTAATTCCCTTCCCCTCAATTCCATAA | 1380 | 61 | −2.54 | −2.54 | −2.54 | −2.54 | −1.37 | −2.54 |
| 12184-L4-1 | GACCTCAGCGTGCCCCCTTTCAACCACAGACGAAT | 1381 | 56 | −2.73 | −2.21 | −3.89 | −3.08 | −1.99 | 1.08 |
| | ATTGTGTACAA | | | | | | | | |
| 12184-L5-3 | TGACCTCAGCGTGCCCCCTTTCAACCACAGACG | 1382 | 61 | −5.57 | −5.57 | −5.57 | −5.57 | −2.34 | −1.75 |
| 12224-L4-1 | CAAGGCGTCGCCATGAAAATCCACCCCATGGAGTA | 1383 | 78 | −3.22 | −3.22 | −3.22 | −3.22 | −2.54 | −3.22 |
| | GCA | | | | | | | | |
| 12361-R5-1 | ATGTAAATGTGCCATATTGCCGCCCATCT | 1384 | 67 | −3.34 | −4.62 | −6.42 | −3.65 | −3.60 | −1.50 |
| 12691-R5-1 | CCCCGCCCCTGGCGCGCCCCCGACAGGC | 1385 | 78 | −67.73 | −7.29 | −9.93 | −7.32 | −3.57 | −2.81 |
| 12692-L5-1 | GACCCGGCCCCGCAGCCAGCACCCGGCCACCGCGC | 1386 | 89 | −7.80 | −7.12 | −6.21 | −7.94 | −5.87 | −2.09 |
| 12693-L5-1 | GTCGCGGCCGCCCGGCCCTCCCGGTCCCCTCCCC | 1387 | 61 | −84.98 | −6.22 | −8.38 | −2.30 | −2.98 | −1.86 |
| 12694-R5-1 | TCAGCCCCCAGCGCCCCCCGGAGTTCTTGGA | 1388 | 78 | −6.01 | −5.88 | −9.37 | −6.86 | −6.32 | −2.41 |
| 12696-R5-2 | AACCCGGGCTCCCCCACCCGCTCCCTGA | 1389 | 61 | −4.33 | −3.38 | −7.14 | −5.25 | −4.53 | −1.41 |
| 12697-R5-1 | CCGGTGTGCGCCCCCTCCTACCTCTGCCGGCC | 1390 | 67 | −4.28 | −5.08 | −27.65 | −4.83 | −3.72 | −1.76 |
| 12699-L5-1 | GGCGCCCTGGGCCTCGGCGCCCCGCCCGTCCCAG | 1391 | 50 | −4.46 | −29.74 | −4.16 | −3.65 | −2.69 | −1.18 |
| 12701-L5-1 | AAATCCTCGCCATCCTCCACCCCCAGCCCCGG | 1392 | 78 | −4.43 | −12.74 | −7.02 | −6.42 | −4.98 | −1.97 |
| 12703-L5-3 | AGCCGAGCCCCCGCCCCCGCCGGGATGCTGCCCTC | 1393 | 61 | −4.17 | −3.97 | −5.50 | −4.94 | −3.05 | −1.64 |
| 12704-L5-2 | CTGGCGCCCTCCCCCGCCCGGGGCTCAGCCTC | 1394 | 72 | −4.44 | −5.86 | −10.21 | −3.67 | −2.76 | −2.08 |
| 12713-R5-1 | CTCTCGCGACCGACCTGCCGCCGACCGCCACAG | 1395 | 83 | −7.39 | −6.52 | −7.89 | −5.40 | −7.13 | −1.82 |
| 12722-L5-1 | AAACAAAGTACTTCCGACCTCCCCGCCCGCCCGC | 1396 | 56 | −4.21 | −4.38 | −5.37 | −2.81 | −2.86 | −2.02 |
| 12723-R5-2 | CCCCAGCCCCTTCCTGGCCAGGACCCCAGCGAGG | 1397 | 72 | −18.13 | −18.13 | −18.13 | −3.62 | −3.52 | −4.66 |
| 12725-R5-1 | CCACCCCCTCAAGCCCCCAGGAGCTTCCTTAAC | 1398 | 67 | −22.87 | −22.87 | −22.87 | −4.18 | −9.94 | −1.79 |
| 12731-L5-1 | CAGCCGCGCCGGCCGCCAGCGCCCCGGCGCGC | 1399 | 72 | −14.83 | −14.83 | −14.83 | −4.58 | −3.87 | 1.02 |
| 12900-R5-3 | GTGCCCGTGCCCTAAGCGACCCTCCACTCCCTCAA | 1400 | 56 | −8.25 | −1.80 | −8.25 | −1.90 | −3.08 | −2.33 |
| 12904-R5-2 | CTGCCTCCCTGACCCCAAAACACACCTGACTGCC | 1401 | 61 | −2.67 | −4.87 | −4.22 | −2.80 | −2.26 | −9.55 |
| 12910-R5-2 | GCTCCATTTCCCCACTGAAATGACAAAATCCA | 1402 | 61 | −4.61 | −4.61 | −4.61 | −4.61 | −4.61 | −1.30 |
| 12925-L5-3 | GAACACCTCCTCCTTTTCCCTTTGGTGAATAAAGA | 1403 | 61 | −2.02 | −2.02 | −2.02 | −2.02 | −1.68 | −2.02 |
| 12932-L5-3 | GACTCCCTTCCACCCCCATTTCCCACCTACTAAT | 1404 | 67 | −8.22 | −8.22 | −8.22 | −3.88 | −4.15 | −8.22 |
| 12939-L5-2 | CTGATTCAAAACCCACCTCTACAACTTAATAGCT | 1405 | 72 | −2.19 | −2.19 | −2.19 | −2.19 | −2.19 | −2.19 |
| 12947-R5-3 | GCCCCCTCCATAGAGAGAGGCCCCAGGGGAGTGA | 1406 | 72 | −28.53 | −28.53 | −28.53 | −5.22 | −4.41 | −2.39 |
| 12975-L5-1 | GGAGTCTACAACATCCCTCCCGCCT | 1407 | 50 | −2.29 | −3.08 | −4.02 | −2.31 | −2.47 | −1.53 |
| 12981-L5-1 | AATGATGTCACCTTGGTCTGGTTGCCCCCACCC | 1408 | 61 | −4.08 | −4.08 | −4.08 | −4.08 | −2.35 | −1.27 |
| 12981-R5-1 | GGGTGAAGACAGACAGAACCCAGACCCTCCCATAG | 1409 | 50 | −2.22 | −9.73 | −9.73 | −2.36 | −3.84 | 1.96 |
| 12998-R5-1 | CAGGCCCCAGTGCCACCGCCAAGGCTATC | 1410 | 89 | −12.85 | −12.85 | −12.85 | −12.85 | −10.71 | −3.87 |
| 13004-R5-1 | CTCCAACCCCCGCAATTCTCGCTCCCTTCACCTGA | 1411 | 56 | −2.79 | −4.11 | −6.82 | −4.51 | −3.96 | −2.17 |
| 13047-R5-2 | GCACAGCAGACCCCATGCACTAGCCCCGGGCAC | 1412 | 50 | −2.69 | −2.69 | −2.69 | 1.15 | −1.55 | 1.18 |
| 13050-R5-4 | ACGCACCCCTATCTCCCACCCCCCGCAAGCCAAGCA | 1413 | 78 | −4.94 | −6.60 | −11.56 | −5.96 | −5.41 | −2.49 |
| 13052-L5-1 | TCCCCGGACCTAAGCATCTCCCCCACCCGCCAACC | 1414 | 61 | −2.01 | −3.27 | −4.41 | −3.51 | −3.73 | −1.83 |
| 13066-R5-2 | GGAGGTAGCCCCCAAATCTAGTTGAACCAATTC | 1415 | 61 | −2.42 | −2.42 | −2.42 | −2.42 | −2.42 | −2.42 |
| 13072-L5-2 | GGATTTCACCAAACGTATAGCCCCCACCAGTA | 1416 | 78 | −6.78 | −30.88 | −30.88 | −7.56 | −5.70 | −2.19 |
| 13075-L5-1 | TGAAAGCTGAAGTCCAGCCCAGCCCTCT | 1417 | 56 | −6.29 | −6.29 | −6.29 | −2.93 | −2.98 | −2.05 |
| 13089-L5-2 | ATCACCAACAACCTTGCCCCACTCCAAGCCCTG | 1418 | 61 | −2.76 | −2.76 | −2.76 | −2.76 | −2.23 | −2.76 |
| 13091-L5-2 | CCTGAGAACCCCCGACCCTCAAGTGTTCAGCAGGC | 1419 | 78 | −3.59 | −8.53 | −11.47 | −12.31 | −8.16 | −1.70 |
| 13093-L5-2 | CGACCCCGCAGAACCCCACCGCGCCCCGCGCAG | 1420 | 67 | −4.46 | −10.00 | −7.28 | −7.97 | −7.96 | −1.06 |
| 13095-R5-1 | GCAGGACCCACCTCCCTACTCCTGGCCCAGGT | 1421 | 67 | −10.16 | −10.16 | −4.31 | −2.54 | −5.00 | −2.96 |
| 13097-L5-2 | AGCCTCAGCCCCACCTCCAGCCCCACCCTAGGG | 1422 | 56 | −3.53 | −3.87 | −4.76 | −4.17 | −3.23 | −1.41 |
| 13110-R5-1 | AACAGCAGACAGGGTCCCAGGGCCCTCCCTTGT | 1423 | 56 | −4.98 | −4.98 | −4.98 | −1.26 | −2.35 | −1.54 |
| 13115-L5-3 | ACCCCCTCCAGGGCCGACCACCCCAACCCAAAC | 1424 | 78 | −8.12 | −18.66 | −32.34 | −7.11 | −5.65 | −2.64 |
| 13119-R5-2 | GACTCTGCCGCTCCCGCCCGGCCACCTCCCTGT | 1425 | 61 | −3.93 | −3.70 | −4.56 | −3.71 | −3.93 | −1.95 |
| 13124-L5-1 | TCCTCCCCTCCGCGAAAGCCTAAACTTACCCCTCA | 1426 | 50 | −2.05 | −2.84 | −5.18 | −3.12 | −2.71 | −1.10 |
| 13129-L5-3 | AGCCTTCCTGTCCCCTGGCCCCCGACCTGCTCCA | 1427 | 78 | −2.06 | −2.16 | −2.55 | −2.91 | −3.95 | −6.35 |
| 13130-L5-1 | AGCCCGCCCCAACCCACCTCGATCTTTTCCTC | 1428 | 56 | −2.86 | −5.27 | −3.54 | −2.26 | −1.75 | −2.84 |
| 13135-R5-1 | CGAGGAGGCCCTGAGCACTGCCCACCCCCACACC | 1429 | 72 | −4.99 | −4.99 | −6.04 | −4.00 | −7.63 | −1.74 |
| 13136-L5-3 | ACACTTGCCCCTGCCAGCCCTGGTCAGGGCCACCCT | 1430 | 78 | −6.86 | −6.86 | −6.86 | −6.86 | −2.82 | −2.13 |
| 13137-L5-1 | GCTCTAACCCCCGCAACCCCACCTCCCCATGCC | 1431 | 61 | −2.47 | −3.81 | −5.83 | −3.96 | −3.31 | −1.66 |
| 13138-R5-1 | TTCGCCACGCCCCGCCACCCGAGCTGCCTCCC | 1432 | 78 | −5.42 | −5.75 | −7.42 | −6.65 | −4.73 | −2.51 |
| 13163-R5-1 | AGACCAAAGCCCTCCCACCCCTTCCCCTCCCAGC | 1433 | 72 | −5.88 | −16.87 | −21.10 | −2.25 | −2.25 | −2.13 |
| 13164-L5-1 | GAAAACAAACATCTAATAAACTCTCAGGATACC | 1434 | 50 | −5.10 | −5.10 | −5.10 | −1.16 | −2.10 | −1.52 |
| 13166-L5-1 | TCAGAGGACCCCCCGACCCACCCCGCGAGGC | 1435 | 83 | −6.08 | −6.39 | −9.71 | −13.71 | −5.78 | −2.21 |
| 13181-L5-1 | GAACAGTCACTGCCTGCCCCAACCTCTTTCAGGA | 1436 | 67 | −7.92 | −7.92 | −4.10 | −1.01 | −3.99 | −7.92 |
| 13184-L5-1 | CAAAAAATAAACCAAAAACCCACCACCTAATG | 1437 | 56 | −2.31 | −2.31 | −2.31 | −1.65 | −2.31 | −2.31 |
| 13186-R5-2 | ACATTCATCTCTGTCAGATCCCTCCCTCACCA | 1438 | 67 | −4.00 | −9.93 | −26.53 | −3.44 | −2.79 | −1.55 |
| 13195-L5-3 | TCTATATTCCCCCTCCATGACCATTTGTATTAG | 1439 | 78 | −3.32 | −11.15 | −8.93 | −3.70 | −2.85 | −5.82 |
| 13199-R5-1 | GCTGGGGGATTCTGCCCATGCTTCACCTCCC | 1440 | 50 | −2.48 | −8.02 | −5.59 | −2.40 | −6.24 | 1.53 |
| 13202-L5-1 | GGGTCTCCTGCCACCTCCTCTGAGAAGCCCCACCA | 1441 | 61 | −10.20 | −10.20 | −10.20 | −4.67 | −4.70 | −3.14 |
| 13202-R5-2 | GGTGGGGAGACTGGGAGAGAGCCCTCCTAATG | 1442 | 56 | −3.89 | −14.39 | −14.39 | −2.07 | −2.32 | −1.06 |
| 13209-L5-2 | TAACTCGCCTGCTGCCCCGGCGGCCTGCCCGCCG | 1443 | 61 | −45.23 | −4.90 | −5.49 | −3.79 | −3.36 | −1.44 |
| 13209-R5-3 | TGGTCGCCGCCGCAGGCGCCTGAAGGGCACGGCGG | 1444 | 61 | −12.46 | −12.46 | −3.05 | −3.57 | −6.27 | 1.13 |
| 13211-L5-1 | ACGCGCCCCGCCGCTCTCTGACCGACCGGAGGCGC | 1445 | 61 | −7.25 | −6.22 | −5.47 | −5.00 | −4.38 | −1.43 |
| 13220-L5-3 | CCTGTAGCTGCCACTGCCCCTTCCTCACTCAACC | 1446 | 72 | −5.92 | −19.89 | −9.41 | −4.26 | −3.98 | −1.61 |
| 13229-L5-1 | ACCCGTCCCTGCCCCTTTACCCCTTGGGCCAGCA | 1447 | 61 | −5.10 | −4.62 | −6.00 | −4.16 | −3.60 | −1.59 |
| 13230-L5-4 | TAGCTCCAGTGCCTCCAGCTCCAACCACCTGAA | 1448 | 50 | −2.05 | −2.05 | −2.05 | −2.05 | −1.39 | −2.05 |
| 13231-L5-2 | GGGGCCGCTCCCCAGCACCGACGCCAGCATCATCG | 1449 | 56 | −16.99 | −16.99 | −3.88 | −4.81 | −8.33 | 1.00 |
| 13237-L5-4 | ACCCCCTCCAGGGCCGACCACCCCAACCCAAACAA | 1450 | 72 | −35.36 | −16.82 | −35.36 | −6.88 | −5.65 | −2.41 |
| 13239-L5-2 | CAGAGCTCCCCCCATCTCCCCAGACTTACCCCT | 1451 | 72 | −4.10 | −15.67 | −39.77 | −6.16 | −5.51 | −1.58 |
| 13240-L5-2 | AATCGCCGTCCCCGCCGCGGCATTCCCGGCCCCAA | 1452 | 72 | −60.67 | −6.31 | −7.99 | −5.64 | −4.93 | −1.84 |
| 13241-L5-2 | ACACCCCTCCAAAACCACACAGAGCAAGCAAGG | 1453 | 72 | −10.26 | −10.26 | −10.26 | −3.74 | −4.35 | −10.26 |
| 13251-R5-2 | TTGTGCCCCCTCCTCTGCCATGGCTGGTCCCTGG | 1454 | 78 | −5.70 | −7.57 | −14.60 | −5.42 | −4.16 | −2.77 |
| 13259-R5-1 | GCCAGAATTACCACTGTATCTGTCCCCACCCC | 1455 | 72 | −3.29 | −3.29 | −3.29 | −3.29 | −2.05 | −3.29 |
| 13267-L5-1 | CACTCCCTGCTGGCCCCCACCTCACCTATGGTG | 1456 | 61 | −1.87 | −2.26 | −13.85 | −2.21 | −3.68 | 1.35 |
| 13281-L5-3 | CACCCCCACCCCACAGGACAGAGGAAGTGACGAG | 1457 | 56 | −3.70 | −9.33 | −5.75 | −7.17 | −4.05 | −6.04 |
| 13283-L5-3 | GGACCCCTGCCTTCCTTGCTGCCACCCTTTGCACA | 1458 | 50 | −3.60 | −7.29 | −3.33 | −3.32 | −2.19 | −1.11 |
| 13285-L5-3 | GCTATGCACCCAGCCGCCCAGCTCAGCCCCTGC | 1459 | 78 | −6.84 | −6.59 | −7.59 | −4.39 | −4.35 | −1.93 |
| 13287-L5-3 | GGAGCCACCCCACCCTCCTCCCAAGACCCACAT | 1460 | 56 | −3.34 | −3.34 | −4.88 | −3.81 | −2.82 | −2.04 |
| 13291-L5-1 | CCCAAGCGCCCCTTCCTCCCTCCTTCCCTCCCG | 1461 | 50 | −2.07 | −2.35 | −3.92 | −2.62 | −2.12 | −1.10 |
| 13293-L5-1 | TGCCTGGCCAGGCCTCCGCCCCTTGGCTCGCCAC | 1462 | 61 | −3.68 | −3.42 | −6.95 | −3.41 | −3.34 | −1.42 |
| 13298-R5-1 | CAGGGCTTCAGCCTCCCCACAGCCCCACACTT | 1463 | 78 | −14.82 | −14.82 | −14.82 | −8.93 | −8.41 | −4.71 |
| 13303-L5-3 | CCTCCCCTGAACCCAGTTGCCACAACTTTCCAC | 1464 | 50 | −2.57 | −7.48 | −4.39 | −2.24 | −5.82 | −1.05 |
| 13308-L5-1 | CACTCACATCAGCCCATCCACCTCCACCTCTCCAC | 1465 | 50 | −14.43 | −3.76 | −3.43 | −2.63 | −5.96 | −3.88 |
| 13310-R5-1 | ATCCATTGCCACTACCACCACCAATAATTAAAA | 1466 | 56 | −6.22 | −6.22 | −6.22 | −6.22 | −4.23 | −6.22 |
| 13312-L5-2 | TGCCACCCCACCCCTCCCCCACAGCCCAGCCC | 1467 | 72 | −3.89 | −4.71 | −7.40 | −5.54 | −3.94 | −2.64 |
| 13313-L5-2 | CCTGTCTCCCATGCCGTGTCCCTCCCACTAACC | 1468 | 61 | −3.49 | −4.79 | −7.64 | −2.95 | −2.68 | −1.55 |
| 13316-R5-2 | CCACCACCTTGCTGCTGGCCCACAGCACCAGGCC | 1469 | 50 | −4.30 | −4.30 | −2.50 | −2.88 | −4.30 | −1.25 |
| 13326-L5-2 | CAGAGATTCCGGCTTCCCCCCACCCGCCCTTC | 1470 | 67 | −4.02 | −4.30 | −8.40 | −5.02 | −4.30 | −2.41 |
| 13328-R5-2 | TCACCTGCCCCCACATCTGCAACACACAAGAGT | 1471 | 72 | −14.53 | −14.53 | −14.53 | −4.04 | −7.65 | −4.27 |
| 13332-L5-1 | CCATACTCTCCAGCTGTCTTCCCTCCCAA | 1472 | 50 | −4.39 | −4.39 | −3.09 | −1.46 | −2.15 | −1.38 |
| 13334-L5-3 | TCCTGGCAGGACTCCCCTCCCCTCCCACTGTG | 1473 | 72 | −3.05 | −5.00 | −8.54 | −3.73 | −3.16 | −2.05 |
| 13335-L5-3 | ACCTCAGCCTCCACTGCCCTCCTGCCGCATCCTAT | 1474 | 61 | −4.66 | −4.99 | −9.25 | −3.74 | −2.81 | −2.08 |
| 13337-L5-2 | TCTTTTTCTGACATTCCCTCCCCCAACATGGAA | 1475 | 67 | −3.58 | −4.94 | −25.53 | −3.71 | −3.28 | −1.08 |
| 13339-L5-1 | GACTGAGGGTTTAAAGAAGATGGTGTCCGCCGC | 1476 | 78 | −45.98 | −6.02 | −7.34 | −3.40 | −4.61 | −1.22 |
| 13343-L5-1 | CCTCCACCCCTCCCGCAGCGCCCCTCCCCCTCA | 1477 | 50 | −3.99 | −5.54 | −7.36 | −3.68 | −3.31 | −1.90 |
| 13349-L5-2 | CACCACCTGTGTGGGCTATCCCAGCCGCCTCC | 1478 | 83 | −7.08 | −7.21 | −6.98 | −4.08 | −4.09 | −1.92 |
| 13353-L5-2 | GCTTCGGCCACAGAAATGTTCGCCCTCTGAAATC | 1479 | 50 | −2.24 | −2.24 | −2.24 | −1.67 | −1.24 | −2.24 |
| 13354-L5-1 | CTGCCCCACAAAGCTCCTGGAACCCCCTCAGT | 1480 | 72 | −17.63 | −17.63 | −17.63 | −4.43 | −9.91 | −1.86 |
| 13355-L5-2 | TGACCACACCCACCCCTATCCTTTCCTGCAGTGTG | 1481 | 78 | −5.51 | −5.51 | −5.51 | −5.51 | −3.48 | −5.51 |
| 13356-L5-2 | GGCCCCTGGCCTCCCTGCCACCCAGCACGGTG | 1482 | 56 | −8.37 | −4.34 | −4.14 | −2.41 | −4.28 | 1.04 |
| 13358-L5-2 | CCTCCTCACCACCCCCTCCACACTCCTGGGGAAGT | 1483 | 78 | −23.01 | −23.01 | −23.01 | −5.08 | −7.50 | −6.25 |
| 13361-L5-1 | GGGAAGCAGAGTCAGTGACCCCAGCCCTGCACAC | 1484 | 83 | −12.93 | −12.93 | −12.93 | −9.37 | −12.93 | −3.94 |
| 13363-L5-2 | GGCCCCCACCGTCACCTGCTGACACCCTCACATCC | 1485 | 83 | −20.98 | −20.98 | −20.98 | −5.06 | −8.92 | −6.01 |
| 13364-L5-2 | TCCCAGGACCCTTCCTGAGCCTCAGCCCATT | 1486 | 78 | −7.47 | −7.47 | −7.47 | −7.47 | −7.47 | −7.47 |
| 13365-L5-3 | TCCCCAGAGCCCGCCCCAACCCACCTCGATCTTTT | 1487 | 56 | −3.16 | −5.55 | −6.40 | −2.46 | −1.71 | −2.63 |
| 13370-L5-2 | CATGCCCCACCCTCACCTCTGCTCCACATACT | 1488 | 50 | −3.37 | −4.07 | −4.87 | −4.29 | −3.66 | −2.25 |
| 13373-L5-4 | GCCCTTACTCCAGCCCCACCGGCTCCCACTCACCT | 1489 | 56 | −7.98 | −7.98 | −3.68 | −2.29 | −4.40 | −1.07 |
| 13374-R5-1 | AGCCTTCCTGTCCCCTGGCCCCCGACCTGC | 1490 | 78 | −5.54 | −4.92 | −5.77 | −5.78 | −4.29 | −2.09 |
| 13375-L5-3 | GAGAACCTGAAACCCCAGCCCCTGCCTACCCCTTAG | 1491 | 72 | −4.07 | −4.48 | −7.27 | −6.24 | −3.83 | −1.92 |
| 13376-R5-1 | TCTGCTGCAGGTAGTCTGAATGTCCCCCCAACATC | 1492 | 78 | −4.80 | −21.42 | −28.03 | −11.86 | −5.27 | −3.27 |
| 13380-R5-3 | AACTCCCAGCCCCGGAAGAATGCACACGCAGGAG | 1493 | 61 | −10.07 | −10.07 | −10.07 | −3.28 | −5.31 | 1.13 |
| 13385-L5-1 | AATGACTCCTCCGGCGCCACCTACAGT | 1494 | 50 | −3.98 | −3.98 | −3.98 | −1.32 | −1.86 | −3.98 |
| 13396-L5-2 | GACCTGCCCCGCCCCACTCGGGCTCCTTACCG | 1495 | 78 | −4.91 | −4.88 | −2.43 | −5.34 | −3.01 | −2.26 |
| 13403-L5-1 | TCCCCCCAACCTGGGGCCAGGCCCACCTGGT | 1496 | 67 | −2.41 | −11.03 | −7.77 | −2.10 | −2.32 | −1.72 |
| 13412-L5-1 | AGTCAAGATGGCGCCCCCTGGTCCCAG | 1497 | 61 | −2.15 | −8.32 | −5.84 | −5.72 | −4.18 | −2.68 |
| 13423-L5-3 | GCCCTCCCCTGACTCCCTGAAGCTATTTGTTT | 1498 | 72 | −5.62 | −16.59 | −20.12 | −2.22 | −2.23 | −1.92 |
| 13425-L5-3 | TGCCCTCCCAGTCATATGCGCCGCATCAAGGTT | 1499 | 72 | −5.55 | −18.57 | −19.05 | −2.11 | −2.19 | −1.90 |
| 13430-L5-3 | TTCTTACCTCCCCCCAACCCCCATCCCAGTTACC | 1500 | 72 | −2.66 | −5.22 | −11.00 | −5.21 | −4.82 | −2.37 |
| 13431-L5-3 | CGACACCCACTCACTGCCGCTGCCGCACTCACAGC | 1501 | 72 | −6.02 | −7.11 | −7.16 | −4.36 | −6.77 | −1.47 |
| 13432-R5-1 | ACCTCCCCAAACTCCACGTAATCACCTACTATT | 1502 | 50 | −2.31 | −4.47 | −3.97 | −1.94 | −3.01 | 1.02 |
| 13456-R5-2 | CAGATGCCCCGCTATGAAATCTTTTCCAACC | 1503 | 50 | −1.49 | −5.78 | −14.18 | −2.24 | −1.86 | 1.34 |
| 13458-R5-2 | CCTCCTCGGCACTCCCTCTACCTCACTGTCCAC | 1504 | 56 | −9.56 | −4.35 | −9.56 | −2.05 | −1.81 | −2.58 |
| 13461-L5-4 | TCCCCAGCCCCGTCCCCACCCCCTAGAGAAAGTGAA | 1505 | 78 | −4.88 | −5.69 | −6.76 | −5.00 | −4.09 | −2.33 |
| 13463-L5-2 | ATCCAGGACTCGGACCAGCCCCCCAGCCTGAG | 1506 | 78 | −5.87 | −22.46 | −12.28 | −4.92 | −5.26 | −2.41 |
| 13489-L5-1 | GGGGGAAAGCCTGTGGTCAAGCCAAGGAACAAGA | 1507 | 61 | −2.32 | −2.32 | −2.32 | −1.56 | −2.32 | −2.32 |
| 13497-L5-1 | TGTGCCCCCCTCGCTCCCAGCCCCCAGGGGACCGC | 1508 | 72 | −6.04 | −9.24 | −13.05 | −5.73 | −5.31 | −2.89 |
| 13513-L5-1 | ATCCTCCCTGGGTGGTGCTACTCTCACCAAAG | 1509 | 50 | −3.48 | −3.48 | 1.08 | −3.48 | −3.48 | −3.48 |
| 13519-L5-1 | ACCTTAGCTCTACCCAACCTCGCTTCCCACCCCC | 1510 | 72 | −8.34 | −8.34 | −8.34 | −6.17 | −4.60 | −2.83 |
| 13525-L5-2 | CCATGCTCTCGCGTGATCTCCCCTACCGCCATCGT | 1511 | 78 | −3.26 | −11.76 | −11.76 | −3.63 | −4.94 | −3.67 |
| 25-R5-1 | TTCCCAGAGCCTCACCCCCTCTTTTTCTAACC | 1512 | 50 | −2.21 | −2.37 | −8.78 | −2.46 | −2.10 | −1.26 |
| 266-R5-2 | GTCGCCCCCTCCCCCAAGTTGAGACTTGCA | 1513 | 78 | −3.86 | −6.49 | −10.77 | −4.19 | −3.42 | −2.49 |
| 2786-L5-3 | CACCTCCCGCTCAACTGCCCATACTAATGCTTTT | 1514 | 61 | −7.14 | −7.14 | −7.14 | −5.01 | −4.23 | −7.14 |
| 2811-R5-1 | CCACAGCCACCCCGTGCCACTGTGTCCCAACCC | 1515 | 67 | −5.19 | −5.19 | −5.19 | −5.19 | −5.19 | −5.19 |
| 2819-R5-4 | CAGCCTGCCACCGCCGCTTTTGAAAGAAGCACTTCA | 1516 | 78 | −8.91 | −8.06 | −8.93 | −4.59 | −8.36 | −1.88 |
| 3717-L5-2 | CCGCCCTCCCCATAGCCTCACCCCAAACCCA | 1517 | 61 | −161.90 | −6.67 | −8.36 | −1.07 | −3.17 | −1.51 |
| 3732-R5-1 | TCCCTTTCCCTGCCAGCAAACCCCACCACCCTAAG | 1518 | 50 | −13.70 | −5.71 | −2.96 | −2.29 | −2.86 | −1.31 |
| 3799-R5-1 | CTGAAGATGCTCCCAGAGGCCCCCCGCCGGCC | 1519 | 67 | −3.62 | −5.47 | −7.63 | −3.60 | −3.29 | −2.20 |
| 3897-R5-2 | CCGACCCGCCCGTCAGCCGCCTCCCCCTCAG | 1520 | 72 | −6.31 | −6.25 | −5.66 | −5.22 | −5.39 | −1.95 |
| 3942-L5-1 | TCCCTTCACTCCAGTTGCCAAACAGATCCCCCCAC | 1521 | 61 | −2.19 | −6.40 | −7.64 | −1.72 | −2.42 | −2.05 |
| | TCCC | | | | | | | | |
| 3952-L3-1 | GAGCACTCAATCTGACACCCCTCGCCGGGG | 1522 | 72 | −7.09 | −7.09 | −7.09 | −2.41 | −4.47 | 1.53 |
| 3953-R3-2 | ACTCCAGCCTCCGCCGCCTCAGCTTCCCGAGC | 1523 | 67 | −155.65 | −4.18 | −6.49 | −3.80 | −5.23 | −1.96 |
| 3966-L5-1 | ACCCCAGAGCTGTCGCCGCCGCTGCCGCCTTCGCC | 1524 | 78 | −8.01 | −6.99 | −8.17 | −5.56 | −7.00 | −1.82 |
| 3995-L2-2 | CTATAAAACTTCGAAAAGTCCCTCCTCCTCACGT | 1525 | 50 | −1.95 | −3.65 | −12.55 | −2.00 | −2.04 | 7.12 |
| 4013-L4-1 | CTATGGCACTTGCATGGTTGAGCTATCAGCAGGGG | 1526 | 67 | −2.19 | −2.19 | −2.19 | 1.07 | −2.19 | −2.19 |
| | GACCAT | | | | | | | | |
| 4026-R5-1 | GAGAGAAAGCCCCCCTTTGTCTGGCTTTG | 1527 | 83 | −81.69 | −81.69 | −18.32 | −7.08 | −6.50 | −3.10 |
| 4026-R5-2 | GGCGAGAGAGAAAGCCCCCCTTTGTCTGGC | 1528 | 72 | −7.22 | −14.47 | −19.24 | −5.56 | −6.21 | −3.11 |
| 410-R5-1 | CCAGCTCCACTACTCCGTCCCCGAGGAAGCAAAAC | 1529 | 67 | −5.18 | −5.18 | −5.18 | −5.18 | −3.55 | −5.18 |
| | ACGGCACC | | | | | | | | |
| 4130-L5-1 | TCAGCCAGCACGCCGTCCATGTCCACCAGCACCC | 1530 | 78 | −18.42 | −18.42 | −13.52 | −4.27 | −4.12 | −1.61 |
| 4143-R5-2 | TCAGCGTCTTGCTCTCCTCCTGGTAACAGCAGCC | 1531 | 67 | −3.75 | −3.75 | −3.75 | −3.75 | −3.75 | −3.75 |
| 4258-L5-1 | CCTAGAGAACATATATCTGGTGCCTCTCCTCTTTT | 1532 | 56 | −2.02 | −2.02 | −2.02 | −1.46 | −1.05 | −2.02 |
| | CCCGT | | | | | | | | |
| 4315_C-L4-1 | GCAGCCCCTCCTCCGAGAGGTTGGGGGTCGCGGCC | 1533 | 72 | −3.12 | −84.00 | −7.08 | −2.18 | −2.69 | −2.05 |
| | GCCCGGCCCTCCCGGTCCCCTCCCC | | | | | | | | |
| 4315_D-R4-1 | GGAAAGTCAGCCCCCAGCGCCCCCCGGAGTTCTTGG | 1534 | 72 | −6.78 | −6.28 | −7.97 | −6.33 | −6.20 | −2.25 |
| 4315_E-R4-1 | CCCCCACCAAACCTATTCCCGCATCCTCCCCGGCT | 1535 | 50 | −4.86 | −4.04 | −4.85 | −3.23 | −4.16 | −1.61 |
| | CTGG | | | | | | | | |
| 4315_F-R4-1 | AACCCGGGCTCCCCCACCCGCTCCCTGAGC | 1536 | 67 | −4.81 | −4.70 | −9.00 | −5.38 | −5.04 | −2.05 |
| 4315_I-L4-1 | ACACCTCTGCGCCCCTCAGGCGCCCTGGGCCTCGG | 1537 | 56 | −3.26 | −4.17 | −7.04 | −2.60 | −2.59 | −1.37 |
| | CGCCCCGCCCGTCCCAG | | | | | | | | |
| 4315_K-L4-1 | TCCCAGGGGGCCCTGAACTTGTCAAATCCTCGCCA | 1538 | 67 | −5.56 | −4.67 | −6.69 | −5.88 | −4.81 | −1.81 |
| | TCCTCCACCCCCAGCCCCGG | | | | | | | | |
| 4315-R3-2 | TCCCCGGCCCTCTCCATTCTCGGCTCCGGAGCA | 1539 | 56 | −3.38 | −3.19 | −12.44 | −3.43 | −6.47 | −1.41 |
| 4338-L5-2 | CCTGGGGGTGGGCGGGAGCTGGCCCCACTGC | 1540 | 50 | −2.07 | −2.07 | −2.07 | −1.43 | −2.07 | 1.59 |
| 4340-R3-1 | ATTTTCCAGCCCCTTGTCCCCAGGCCAAAC | 1541 | 61 | −5.28 | −5.28 | −5.28 | −2.61 | −3.21 | −5.28 |
| 4346-L5-1 | TTCTTCCCCCGCCCTCGCCGCGGCCGCGCACCGG | 1542 | 67 | −3.82 | −4.80 | −7.88 | −4.88 | −3.22 | −2.13 |
| 4361-R5-1 | CTCAGCGTCTCCCTCCCTCATGTGCACATGT | 1543 | 67 | −2.26 | −2.85 | −16.06 | −2.89 | −2.23 | −16.06 |
| 4498-L3-2 | GAGATCCAGACGGCCGTGCGCCTGCTGCTGCCT | 1544 | 56 | −2.36 | −9.82 | −2.18 | −1.93 | −6.91 | 1.37 |
| 4516-L5-1 | TCCATCACCCCCCAGGCTGACTCTGGCTCCTGCCT | 1545 | 72 | −14.82 | −14.82 | −14.82 | −4.16 | −7.74 | −1.36 |
| | GGCTCTGCC | | | | | | | | |
| 454-R5-1 | CCAGCTCCACTACTCCGTCCCCGAGGAGGCCAAAC | 1546 | 67 | −2.62 | −2.62 | −2.62 | −2.62 | −2.62 | −2.62 |
| | ACGGCACC | | | | | | | | |
| 4593-R5-1 | CTATAGCAGATGACATAACTCCCCCGGCATCAG | 1547 | 50 | −1.18 | −1.22 | −2.44 | −1.60 | −4.72 | −1.09 |
| 4610-R5-1 | CCTCTGGCCCCTGCCTAATTGGCTGC | 1548 | 72 | −7.69 | −7.69 | −7.69 | −7.69 | −4.10 | −7.69 |
| 4610-R5-2 | GCCCTCTGGCCCCTGCCTAATTGGCTG | 1549 | 56 | −3.23 | −3.23 | −3.23 | −3.23 | −1.70 | −3.23 |
| 4642-R3-2 | CAGCGCTCCCCTTCCTTATTTGAGATCTGTGCA | 1550 | 67 | −10.25 | −10.25 | −10.25 | −10.25 | −5.81 | 1.30 |
| 4666-R5-1 | GACTCCCCCCAACACCTGCGGGTGGCAC | 1551 | 78 | −3.26 | −6.47 | −13.10 | −5.57 | −5.25 | −2.30 |
| 4792-L5-2 | AAGCCAGTTACAGCCCCCACTGCCCCCATAAC | 1552 | 61 | −4.51 | −4.61 | −6.34 | −4.01 | −4.00 | −1.49 |
| 4801-L5-2 | GAACTCTGCCTCCTGTTTGCTACAAAAACA | 1553 | 61 | −4.53 | −4.53 | −4.53 | −4.53 | −2.36 | −4.53 |
| 4813-R3-1 | GATTTTACAATCGGGCTGTTAACCCTCCCG | 1554 | 61 | −3.33 | −3.33 | −3.33 | −3.33 | −2.04 | −1.06 |
| 4875-R2-2 | CACAGCCCCTTCCTGTGACTTCACAC | 1555 | 67 | −2.71 | −25.83 | −7.24 | −2.30 | −2.06 | −1.91 |
| 4912-L5-2 | TACCCCTGGCCCCCAGCTGTGATTGTCTAA | 1556 | 78 | −19.46 | −19.46 | −5.35 | −5.07 | −7.98 | −1.65 |
| 4929-R4-1 | GACGCTGACCCACCGCAGCCCGCACTGTT | 1557 | 89 | −11.74 | −11.74 | −11.74 | −8.30 | −7.20 | −11.74 |
| 5032-R5-1 | CGCACCCGTCCCGTTCGTCCCCGGACGT | 1558 | 72 | −13.13 | −13.13 | −13.13 | −8.64 | −6.34 | −13.13 |
| 5048-L5-1 | CGCCGCTCCTTGTACGCGTACTTCTGCTGCACACC | 1559 | 61 | −11.59 | −11.59 | −11.59 | −3.55 | −5.68 | −1.14 |
| 5071-R5-2 | GACCCCCGCCCCAGTCCCAGCCCAATTAATA | 1560 | 72 | −6.98 | −7.41 | −8.60 | −7.82 | −3.38 | −3.14 |
| 5107-L5-1 | AACTCCCCTTTGACCCCCCAGTACAAACTG | 1561 | 61 | −2.41 | −26.66 | −26.66 | −3.80 | −3.15 | 1.08 |
| 5210-L5-1 | AAAGCTGCCCCATGGGGATCCAACCCCA | 1562 | 67 | −1.97 | −7.99 | −7.99 | −3.58 | −4.09 | −7.99 |
| 5342-L5-1 | CCACCAAACCAAATGCCGCTGCTCTCCTTCCA | 1563 | 56 | −4.62 | −3.77 | −3.56 | −3.08 | −2.92 | −1.28 |
| 5491-R5-1 | GCCGTCGCCCACCAGATCACTCATCAGGCCATGGT | 1564 | 72 | −5.64 | −4.77 | −6.07 | −3.45 | −4.72 | −1.52 |
| | GGCA | | | | | | | | |
| 5521-L5-2 | AGGTCTGTCTTGGGTGGGCCCTCCCCAGAGCAC | 1565 | 50 | −7.60 | −7.60 | −7.60 | −2.62 | −1.22 | −2.35 |
| 554-R5-1 | GGAAAGAGAACAGAGAGAGCCCTCCCAGCAGCC | 1566 | 67 | −5.86 | −17.89 | −18.96 | −2.04 | −2.19 | −1.95 |
| 5554-R5-2 | CCCCACCCCCTCATCAGCTGCTCCCAGATC | 1567 | 61 | −3.72 | −3.98 | −5.48 | −4.08 | −2.80 | −1.59 |
| 5638-R5-2 | GGCCCTCCCCCTGCCTGTGATAGGCTG | 1568 | 78 | −5.39 | −15.00 | −20.91 | −2.61 | −2.48 | −2.16 |
| 5640-L3-1 | GCCATGGAACACCGTGCCTGCCCCTCTCGAGA | 1569 | 61 | −2.75 | −4.95 | −5.84 | −2.71 | −2.38 | −1.80 |
| 5749-R5-1 | ATCATAATCCCCCTTTTGACTTTACATGATC | 1570 | 56 | −3.50 | −3.50 | −3.50 | −1.35 | −1.84 | −3.50 |
| 5757-L5-1 | TGCTTTATTGACTAATGAACCTACCGTGCCGCCAAC | 1571 | 89 | −22.78 | −22.78 | −22.78 | −4.38 | −4.58 | −5.43 |
| 5854-R5-2 | GCCCTCCCTCTCCGAAAGAATGTGTCACCCGGG | 1572 | 72 | −4.59 | −14.74 | −16.09 | −1.96 | −1.94 | −2.01 |
| 5956-L5-1 | GCCTGCTCTGCCAACCCCAAATCCGTCAAGACGCA | 1573 | 50 | −1.50 | −3.54 | −8.83 | −2.47 | −1.20 | −8.83 |
| | TAG | | | | | | | | |
| 5995-R5-1 | CCCCCTTGAGGTTCCTACTGAAATCTGACAATCAG | 1574 | 78 | −2.29 | −2.29 | −2.29 | −2.29 | −2.29 | −2.29 |
| 6008-R5-1 | ACCCCCACCTTTTTCCTGTACCTTACCCGGAG | 1575 | 83 | −9.71 | −9.71 | −9.71 | −9.71 | −5.88 | −3.27 |
| 6008-R5-2 | CAACAATACCCCCACCTTTTTCCTGTACCTTA | 1576 | 78 | −5.41 | −5.41 | −5.41 | −5.41 | −5.41 | −5.41 |
| 6016-R2-1 | AAACTCCAGCAGCCCCGTCAGCCTCCTGCT | 1577 | 61 | −3.58 | −3.27 | −3.65 | −3.22 | −2.34 | −3.50 |
| 6023-L5-1 | AAGGCAGAGCCAGATGACTGGTCCAACCCCCCAGA | 1578 | 72 | −4.72 | −19.11 | −19.11 | −5.65 | −9.37 | −1.46 |
| | GACC | | | | | | | | |
| 6087-L4-1 | CTGTCTCCATTACTGCCTGCCACCTTCTCCATC | 1579 | 78 | −8.97 | −8.97 | −8.97 | −6.19 | −5.07 | −8.97 |
| 6096-R5-1 | CTTTCCCTTATGTTTTAATCCTGCCCCGT | 1580 | 89 | −12.65 | −12.65 | −12.65 | −2.15 | −6.96 | −12.65 |
| 6192-L5-1 | AATCCGTGAAGATAAAAAACCACCCACCCAGCAC | 1581 | 50 | −13.47 | −13.47 | −2.70 | −1.88 | −6.10 | 1.34 |
| 6198-R5-2 | GCCGCCGCCGCCGCGTCTTCCCGCGAAGCCT | 1582 | 67 | −4.03 | −2.96 | −5.71 | −4.41 | −4.65 | −1.50 |
| 6242-R5-1 | CCCCCACAGTGGCATATGTGACAAACCCAAAGCCC | 1583 | 67 | −5.90 | −5.90 | −5.90 | −5.90 | −4.69 | −5.90 |
| | CTGG | | | | | | | | |
| 6287-L3-2 | GCCCCGCCCCACCTTTCGGGGCTCACCTGGC | 1584 | 72 | −19.21 | −19.21 | −4.59 | −4.31 | −2.70 | −1.67 |
| 6385-R5-2 | GGCCCTGCCCACGGACCGACTCCCGCGGCCC | 1585 | 67 | −9.70 | −9.70 | −9.70 | −9.70 | −5.59 | −3.26 |
| 6409-L3-1 | CGTTCCCAACCGCACGCGCCGCCTTCTGGAAC | 1586 | 72 | −8.06 | −7.09 | −6.76 | −4.68 | −5.18 | −1.54 |
| 6434-R5-1 | TGCAGCCCTCCCACCAGCCAGCTGCAGTGC | 1587 | 67 | −4.42 | −12.82 | −29.88 | −2.13 | −2.32 | −1.24 |
| 6490-R5-3 | CCCCATCCCCCATATGACGCTTCCCCCTCCTAAC | 1588 | 67 | −3.39 | −4.20 | −23.58 | −4.26 | −6.83 | −1.35 |
| 6496-R5-2 | CCCCCTCCCCCACCCACCACTTCCCCTAGA | 1589 | 67 | −44.85 | −14.21 | −9.47 | −4.89 | −3.70 | −2.49 |
| 6584-L5-1 | GTCGGCCCTGCCTCCTCCTCCTCTCACCAAGC | 1590 | 56 | −13.67 | −5.50 | −13.67 | −2.42 | −2.29 | 1.17 |
| 6590-L5-1 | GGTTAATGAGAAACCAAATAAACAGCCTCTGCCCC | 1591 | 56 | −4.65 | −4.65 | −4.65 | −4.65 | −2.56 | −4.65 |
| | AGCTG | | | | | | | | |
| 6642-R5-1 | GTCCTCCCCTCCCCTCGAGGTGTCACACA | 1592 | 56 | −4.01 | −5.51 | −6.59 | −3.85 | −2.99 | −1.63 |
| 669-R5-2 | CCAGCCCTGAGCCACCCTCCCGGGAAACCCCACA | 1593 | 67 | −10.57 | −10.57 | −10.57 | −1.47 | −6.18 | −2.07 |
| 6718-L3-2 | GCCTCCACCACCATAGGGGCCAGAGCTTCTGCCT | 1594 | 72 | −3.98 | −3.98 | −3.98 | −3.98 | −3.30 | −3.98 |
| 6839-L3-1 | GCCCGCTGGGCCCTGCCACCCCCACCCCT | 1595 | 72 | −5.32 | −4.50 | −6.48 | −4.99 | −4.55 | −2.17 |
| 6880-L3-2 | ACCTCCCCCGCGAAGACATCCACATTCTGCA | 1596 | 61 | −2.19 | −4.09 | −5.43 | −2.08 | −4.56 | −1.52 |
| 6908-L3-2 | AGAGGCTACTGGGGGAACAAGACTGGCAAGCC | 1597 | 50 | −2.84 | −2.84 | −2.84 | −1.73 | −2.84 | 4.40 |
| 6984-R4-1 | CCCCCTGCCCAAGCATTTGCTTGGGCACCAAAGTC | 1598 | 67 | −3.05 | −18.59 | −18.59 | −4.32 | −7.50 | −1.51 |
| | CCTGCAA | | | | | | | | |
| 7029-R5-1 | CAAGAGCCCTGCCCCAGCAGCAGCCGCAC | 1599 | 67 | −10.64 | −10.64 | −3.52 | −2.90 | −2.27 | −3.48 |
| 7061-R5-2 | TCATGGAAACCCCACCCTTCCCATGCCCAACC | 1600 | 56 | −3.93 | −4.19 | −5.53 | −4.35 | −3.52 | −2.45 |
| 7066-R5-1 | TAGCCTGAAAAAAGATGCCCCCACCAGCCCTGCC | 1601 | 78 | −6.87 | −6.68 | −11.13 | −7.24 | −11.42 | −2.31 |
| 7069-R5-1 | CTCGGGCCCGGCCCCCTCCGAGCTCAACAGGCTCC | 1602 | 78 | −6.84 | −7.03 | −9.92 | −5.66 | −4.77 | −2.63 |
| | CA | | | | | | | | |
| 7113-R5-1 | CGCCTAATTAGCCCCCCTGCTCCGGAGGCCTCACC | 1603 | 78 | −10.08 | −16.70 | −18.94 | −7.28 | −6.96 | −3.32 |
| 7126-L3-1 | GCACACCCGCTCTCCGGCCCGCGCCCCTG | 1604 | 61 | −3.58 | −3.60 | −3.88 | −3.21 | −4.09 | −1.48 |
| 7141-R5-1 | ACCCCAATCCTTGTTATGTAACCTACCACCTACCC | 1605 | 72 | −2.31 | −2.31 | −2.31 | −2.31 | −2.31 | −2.31 |
| | CTT | | | | | | | | |
| 7221-R5-1 | GGAGAGAAACCCCGGCCACTTCCCACCACCCTGGT | 1606 | 56 | −2.57 | −2.97 | −3.51 | −3.96 | −6.16 | −1.10 |
| | GGC | | | | | | | | |
| 7313-L5-2 | CTGCCTCTGCCCTGATCATCAAAGCCCTCAAGGA | 1607 | 61 | −2.26 | −2.26 | −2.26 | −2.26 | −1.58 | −2.26 |
| 7352-R3-2 | GCCCCTGCCAGAATCCTCTAACAGCTCTAATTGG | 1608 | 50 | −2.04 | −2.07 | −2.22 | −2.46 | −1.45 | −3.40 |
| 7356_A-R4-1 | CAGAGCCCGCTCTCGCGACCGACCTGCCGCCGACC | 1609 | 67 | −7.83 | −6.39 | −7.11 | −4.76 | −6.17 | −1.56 |
| | GCCACAG | | | | | | | | |
| 7356-L5-1 | ATCCGGGCTGCCACCGCGACATAGCCTCGCCCCC | 1610 | 56 | −3.91 | −3.91 | −6.19 | −3.02 | −2.48 | −1.08 |
| 7367-L1-1 | AGGGTTAGAGCTGCCCCCTCTGGGGACCG | 1611 | 50 | −5.61 | −1.12 | −5.61 | −1.54 | −2.24 | −5.61 |
| 7384-R3-1 | CTCGCAAAGGATCTCCTTCATCCCTCCCCA | 1612 | 61 | −3.15 | −7.30 | −4.15 | −3.12 | −2.40 | −1.29 |
| 7411-R3-2 | AGTCCCCTGCCTCATCTGCCACCCCTAATGAC | 1613 | 50 | −2.55 | −2.66 | −13.01 | −2.77 | −1.83 | −3.86 |
| 7569-L5-2 | TTCAGGCCACAAAGCTACCCCCAAGACAG | 1614 | 67 | −3.93 | −3.93 | −3.93 | −3.93 | −3.93 | 2.42 |
| 7571-L5-1 | CAGGGCTAACAGGGCTCCCCCACCCCTAAG | 1615 | 56 | −3.75 | −4.46 | −6.71 | −5.25 | −4.30 | −1.32 |
| 7572-R5-2 | ATCACCCTTCCCCCTCCCAAATAAAGCCAAA | 1616 | 50 | −22.49 | −4.07 | −6.89 | −3.47 | −2.12 | −1.57 |
| 7660-L5-1 | GCCTCCGCCTGGCCCGAGCGATAAAGCTC | 1617 | 56 | −3.55 | −7.83 | −4.16 | −3.75 | −3.08 | −1.29 |
| 7702-L2-1 | CCCAGAGAACCGGAATTCCTCCCCGCCCC | 1618 | 78 | −6.38 | −6.47 | −8.59 | −5.58 | −4.12 | −2.55 |
| 7736-L5-1 | ATCCCCACCACCCACCAGAAGGCGACGGTCTCC | 1619 | 50 | −10.35 | −10.35 | −2.65 | −4.09 | −5.59 | −2.98 |
| 7743-L5-1 | GAGCTCCCCAGCCAGCTCCAGTTCGACCTGCCTT | 1620 | 67 | −7.13 | −7.13 | −7.13 | −7.13 | −5.90 | −7.13 |
| 7781-R5-2 | AGCCTGTGCCTGCCGCTGTCTAGTACTGGT | 1621 | 72 | −22.71 | −12.29 | −6.84 | −3.46 | −3.67 | −1.44 |
| 7824-R5-1 | TGCCAGCTTCATCGCCGCCTCACACACACA | 1622 | 72 | −10.99 | −8.91 | −14.45 | −5.40 | −5.99 | 4.65 |
| 7846-L5-2 | GTCCTCCTCCATCCCATCCCTTCCACCAGCCCT | 1623 | 50 | −2.66 | −2.66 | −2.66 | −2.66 | −1.45 | −2.66 |
| 7883-R5-1 | CTCTCCCCTCCCGCCCTCTCACCCTCCCAACCTTA | 1624 | 50 | −3.69 | −4.72 | −7.94 | −3.56 | −2.66 | −2.03 |
| | TTTAGAAAC | | | | | | | | |
| 78-R4-1 | CCAGAGCTTCTCAAGGGGGACTACAACTCCCAAGG | 1625 | 50 | −2.39 | −2.39 | −2.39 | 1.35 | −2.39 | 1.44 |
| | TACATACAA | | | | | | | | |
| 7949-R5-1 | GATGCGCGCGCCGACCGCCGCCAGCTGCAATTCAT | 1626 | 72 | −4.04 | −3.23 | −5.42 | −3.02 | −5.45 | −1.05 |
| | AC | | | | | | | | |
| 7971-L5-1 | TGTCACTCCCCTGCCGCTCCCTGGGTGCAGGCT | 1627 | 61 | −7.45 | −7.45 | −7.45 | −3.26 | −5.59 | −2.17 |
| 8016-L3-1 | TCAGCGCAACAAGCCCCGCAGTCACCCCTCT | 1628 | 50 | −3.02 | −3.60 | −2.40 | −2.98 | −2.70 | 1.10 |
| 8062-R5-1 | GGGCAAAGGTCACGGGGTCCAAGGCCTTAAGCACC | 1629 | 50 | −7.61 | −7.61 | −2.06 | −1.46 | −1.16 | −2.34 |
| | TCCGCCA | | | | | | | | |
| 8077-R3-1 | CCATTCCCCACCCTCAGGTAGTAAAAATA | 1630 | 67 | −2.08 | −10.66 | −3.95 | −3.94 | −2.28 | −10.66 |
| 8089-L5-1 | TAGAGACCCTTATAAGCTCAGGGCCACCCCCTCCC | 1631 | 78 | −12.58 | −12.58 | −12.58 | −4.10 | −6.46 | −4.03 |
| 8239-R5-1 | TGATTTTCTTCCCACTTCACCTCCCTCTGAGCTCT | 1632 | 56 | −7.85 | −7.85 | −7.85 | −2.34 | −5.84 | −2.52 |
| | CCA | | | | | | | | |
| 8250-R5-2 | CCGACCCGCCCGTCAGCCGCCTCTCCCTCAG | 1633 | 72 | −8.36 | −6.52 | −12.10 | −5.21 | −5.60 | −2.31 |
| 8281-L5-2 | CAGCCCCTCCCCAGCTGCAGCTGAGGGC | 1634 | 61 | −2.82 | −7.08 | −8.59 | −2.10 | −2.55 | −1.83 |
| 8298-R5-1 | GATGCTGGCGTCCGCCGCAGCCTCTCGCCCCATCC | 1635 | 72 | −7.60 | −6.38 | −5.79 | −4.53 | −4.42 | −1.51 |
| | CGG | | | | | | | | |
| 8329-L5-1 | TCCTTCCAAACGCCCACCCTGGGTCAGCTC | 1636 | 72 | −7.14 | −7.14 | −7.14 | −4.59 | −3.30 | −7.14 |
| 8336-R5-2 | CCTCCCCACTCAGTCCCCACACCCCCAGCCA | 1637 | 56 | −3.54 | −3.08 | −4.97 | −3.00 | −3.92 | −1.33 |
| 8394-L5-2 | TGGGGCCCCCGCCCTGCCCATCTCCGACTATCC | 1638 | 50 | −3.26 | −3.15 | −4.42 | −4.40 | −2.96 | −1.58 |
| 8564-L5-1 | ACCCCAGTTGCCAAACAGACCTCCCACCCCCT | 1639 | 72 | −9.90 | −9.90 | −9.90 | −2.63 | −4.92 | −3.12 |
| 8564-R5-2 | AGGGGCTGGGGGAATCCCAGCAGGGGAA | 1640 | 50 | −6.82 | −6.82 | −6.82 | −1.12 | −3.67 | 3.00 |
| 8898-R5-1 | CAGCCGAGGCGGACGCCCGCTCCCGCCACCATG | 1641 | 72 | −5.76 | −6.58 | −7.08 | −4.99 | −4.72 | −2.23 |
| 9021-L5-2 | GAAACAAACACCCAAGCTCCCCACACCA | 1642 | 50 | −9.46 | −9.46 | −9.46 | −4.34 | −5.86 | 1.27 |
| 9068-R5-2 | GTCTGCCCTCCCTCTTGATCAAGACTGCTCT | 1643 | 67 | −6.33 | −16.55 | −18.60 | −2.35 | −2.21 | −1.89 |
| 9087-L5-2 | AGGAAAAGAAACCCTCCCAGTCCATTCCCT | 1644 | 72 | −6.46 | −10.39 | −14.13 | −5.66 | −5.34 | −1.11 |
| 9134-R5-1 | GAAAGGGTTATCCGCCTGGTTGCGGGGCTGC | 1645 | 50 | −2.19 | −2.19 | −2.19 | −1.49 | −2.19 | 1.49 |
| 9217-L3-2 | CGCTAAACTGACGATCCCCGCCGTGACTAAAGCCA | 1646 | 72 | −4.02 | −10.70 | −3.72 | −4.17 | −2.98 | −1.46 |
| 9245-R5-1 | TCTCATTAGCCAGCCACTCGCTCCCAAG | 1647 | 67 | −7.70 | −7.70 | −7.70 | −5.35 | −4.29 | −7.70 |
| 9287-L5-2 | GATATTCAGAGCCCTCCCCAGCCCACACA | 1648 | 67 | −4.67 | −9.40 | −29.04 | −1.28 | −2.93 | −1.16 |
| 9369-L5-1 | TCACACATTCTTCCACAGAGGGAAATCAGGGGA | 1649 | 50 | −2.53 | −2.53 | −2.53 | 1.38 | −2.53 | 1.22 |
| 9384-R5-2 | AAACCAGCTAGCAAACCGCTCCGTCCGTATTG | 1650 | 78 | −15.00 | −15.00 | −15.00 | −15.00 | −7.95 | −4.59 |
| 9387-R2-2 | TCCATCCTTGCCGTCGCCTTCATCTCAAAGCCATC | 1651 | 67 | −7.04 | −4.60 | −3.03 | −4.14 | −4.99 | 3.25 |
| 9564-R5-2 | GCCGCCCGCCGGGCACCGGGCCGGGCCTGGGC | 1652 | 50 | −3.25 | −3.61 | −4.38 | −3.31 | −2.97 | −1.18 |
| 9605-R5-1 | GCCCCCAAGTGAAAAACAGAGCAAAACTCATTTCC | 1653 | 50 | −2.11 | −2.11 | −2.11 | −1.42 | −2.11 | −2.11 |
| | TGA | | | | | | | | |
| 9691-L5-1 | CATTTCATCCGCATCTCCCTCTTGGCCCCTTGC | 1654 | 56 | −3.33 | −6.89 | −4.05 | −5.66 | −2.65 | −4.01 |
| 9770-R5-2 | CACCTGTTGCCAACCCCAGCCCTATAA | 1655 | 67 | −16.08 | −16.08 | −16.08 | −3.95 | −7.31 | −1.78 |
| 9774-R2-2 | CCGCCCCCTCACCGCCTCCTGCTCCCATCAGGC | 1656 | 83 | −7.02 | −6.70 | −13.75 | −8.18 | −5.97 | −2.86 |
| 9812-L3-1 | AAGCTCTATTTATCTGGGCTCCCCAGCTTGCT | 1657 | 56 | −1.83 | −8.36 | −8.36 | −2.32 | −2.02 | −2.57 |
| 9866-L5-1 | TAGGAGAGGGGCTCCATTGCCAGCCCCAGCCC | 1658 | 94 | −11.22 | −11.22 | −11.22 | −11.22 | −5.31 | −3.72 |
| 999997-R4-1 | TCCTCACTGGGCCCCACCAAAACTGTGCCACCCCC | 1659 | 72 | −4.04 | −4.22 | −40.37 | −2.33 | −5.94 | −1.62 |
| | TCAAGCCCCCAGGAGCTTCCTTAAC | | | | | | | | |
| let-7b | TGAGGTAGTAGGTTGTGTGGTT | 1660 | 56 | −1.48 | −6.50 | −2.74 | −2.48 | −2.61 | −1.23 |
| let-7c | TGAGGTAGTAGGTTGTATGGTT | 1661 | 50 | −1.39 | −5.08 | −2.46 | −2.14 | −2.43 | −1.26 |
| let-7e | TGAGGTAGGAGGTTGTATAGTT | 1662 | 50 | −1.27 | −4.56 | −2.29 | −2.10 | −2.25 | −1.06 |
| miR-100 | AACCCGTAGATCCGAACTTGTG | 1663 | 50 | −1.16 | −15.70 | −1.03 | −3.27 | −2.27 | −15.70 |
| miR-101 | TACAGTACTGTGATAACTGAA | 1664 | 50 | −1.54 | −12.44 | −3.65 | −2.51 | −5.38 | 1.25 |
| miR-1182 | GAGGGTCTTGGGAGGGATGTGAC | 1665 | 50 | −2.49 | −6.37 | −2.91 | −2.61 | −4.75 | 1.04 |
| miR-1207-5p | TGGCAGGGAGGCTGGGAGGGG | 1666 | 50 | −2.88 | −9.91 | −5.91 | −3.63 | −2.81 | −1.28 |
| miR-1224-5p | GTGAGGACTCGGGAGGTGG | 1667 | 61 | −8.27 | −8.27 | −8.27 | −2.05 | −4.54 | −8.27 |
| miR-1225-5p | GTGGGTACGGCCCAGTGGGGGG | 1668 | 72 | −32.61 | −32.61 | −32.61 | −32.61 | −14.04 | −2.24 |
| miR-1228* | GTGGGCGGGGGCAGGTGTGTG | 1669 | 67 | −3.86 | −3.61 | −6.14 | −5.78 | −2.67 | −2.95 |
| miR-1234 | TCGGCCTGACCACCCACCCCAC | 1670 | 61 | −2.04 | −2.04 | −2.04 | −1.47 | −2.04 | 1.67 |
| miR-125a-5p | TCCCTGAGACCCTTTAACCTGTGA | 1671 | 72 | −3.80 | −7.98 | −2.23 | −5.05 | −2.99 | −2.20 |
| miR-126 | TCGTACCGTGAGTAATAATGCG | 1672 | 83 | −6.57 | −7.43 | −7.29 | −5.33 | −20.83 | −2.68 |
| miR-1268 | CGGGCGTGGTGGTGGGGG | 1673 | 56 | −10.67 | −10.67 | −10.67 | −5.01 | −5.42 | −3.17 |
| miR-130b | CAGTGCAATGATGAAAGGGCAT | 1674 | 50 | 1.68 | −2.21 | −2.21 | 1.20 | −1.89 | −2.21 |
| miR-140-3p | TACCACAGGGTAGAACCACGG | 1675 | 67 | −4.44 | −4.44 | −4.44 | −2.32 | −2.82 | −4.44 |
| miR-145 | GTCCAGTTTTCCCAGGAATCCCT | 1676 | 61 | −5.21 | −7.10 | −4.29 | −4.12 | −3.15 | −1.88 |
| miR-149* | AGGGAGGGACGGGGGCTGTGC | 1677 | 56 | −3.51 | −2.89 | −6.31 | −3.80 | −2.13 | −2.15 |
| miR-150 | TCTCCCAACCCTTGTACCAGTG | 1678 | 61 | −3.14 | −3.14 | −3.14 | −3.14 | −3.14 | 1.10 |
| miR-181b | AACATTCATTGCTGTCGGTGGGT | 1679 | 50 | −2.73 | −2.73 | −2.73 | 2.75 | −1.22 | −2.73 |
| miR-181d | AACATTCATTGTTGTCGGTGGGT | 1680 | 56 | −2.47 | −2.47 | −2.47 | −1.78 | −1.37 | −2.47 |
| miR-185* | AGGGGCTGGCTTTCCTCTGGTC | 1681 | 78 | −10.19 | −10.19 | −10.19 | −2.49 | −2.10 | 2.05 |
| miR-214 | ACAGCAGGCACAGACAGGCAGT | 1682 | 56 | −4.43 | −4.43 | −4.43 | −3.17 | −2.21 | −1.30 |
| miR-23a* | GGGGTTCCTGGGGATGGGATTT | 1683 | 78 | −3.92 | −3.92 | −3.92 | −3.92 | −2.50 | −3.92 |
| miR-30a | TGTAAACATCCTCGACTGGAAG | 1684 | 56 | −19.76 | 1.09 | −4.20 | −1.92 | −2.01 | 1.15 |
| miR-30d | TGTAAACATCCCCGACTGGAAG | 1685 | 50 | 1.47 | 1.77 | −16.33 | 1.08 | −1.97 | 2.70 |
| miR-320a | AAAAGCTGGGTTGAGAGGGCGA | 1686 | 56 | −9.70 | −9.70 | −4.14 | −1.93 | −2.89 | −2.92 |
| miR-320b | AAAAGCTGGGTTGAGAGGGCAA | 1687 | 50 | −2.05 | −5.08 | −6.60 | −1.99 | −3.25 | −3.07 |
| miR-335 | TCAAGAGCAATAACGAAAAATGT | 1688 | 67 | −3.24 | −3.24 | −3.24 | 1.00 | −2.68 | −3.24 |
| miR-34a | TGGCAGTGTCTTAGCTGGTTGT | 1689 | 50 | 3.37 | −2.08 | 1.99 | 2.04 | −1.20 | −2.08 |
| miR-34b* | TAGGCAGTGTCATTAGCTGATTG | 1690 | 67 | 1.46 | −3.29 | −1.58 | 1.09 | −2.68 | −3.29 |
| miR-34c-5p | AGGCAGTGTAGTTAGCTGATTGC | 1691 | 94 | −2.54 | −2.54 | −2.54 | −2.54 | −2.54 | −2.54 |
| miR-371-5p | ACTCAAACTGTGGGGGCACT | 1692 | 56 | −3.87 | −3.87 | −3.87 | −3.87 | −3.87 | −3.87 |
| miR-373* | ACTCAAAATGGGGGCGCTTTCC | 1693 | 72 | −2.95 | −3.88 | −34.48 | −2.43 | −4.31 | 1.09 |
| miR-451 | AAACCGTTACCATTACTGAGTT | 1694 | 94 | −5.28 | −7.77 | −12.78 | −4.68 | −16.47 | 1.61 |
| miR-486-3p | CGGGGCAGCTCAGTACAGGAT | 1695 | 72 | −2.72 | −10.16 | −10.16 | −2.65 | −5.72 | 1.09 |
| miR-491-3p | CTTATGCAAGATTCCCTTCTAC | 1696 | 72 | −2.34 | −2.34 | −2.34 | −2.34 | −1.30 | −2.34 |
| miR-498 | TTTCAAGCCAGGGGGCGTTTTTC | 1697 | 83 | −5.68 | −5.82 | −9.56 | −7.20 | −4.74 | −1.67 |
| miR-557 | GTTTGCACGGGTGGGCCTTGTCT | 1698 | 56 | −2.45 | −5.53 | −10.00 | −2.80 | −1.94 | 1.01 |
| miR-638 | AGGGATCGCGGGCGGGTGGCGGCCT | 1699 | 78 | −9.64 | −8.70 | −11.76 | −7.11 | −6.51 | −2.43 |
| miR-663 | AGGCGGGGCGCCGCGGGACCGC | 1700 | 61 | −15.30 | −15.30 | −5.72 | −3.78 | −7.09 | −3.77 |
| miR-671-5p | AGGAAGCCCTGGAGGGGCTGGAG | 1701 | 56 | −2.58 | −9.36 | −9.36 | −2.04 | −1.63 | −3.08 |
| miR-744 | TGCGGGGCTAGGGCTAACAGCA | 1702 | 67 | −3.86 | −14.84 | −3.85 | −4.06 | −6.80 | −1.26 |
| miR-885-3p | AGGCAGCGGGGTGTAGTGGATA | 1703 | 83 | −7.91 | −26.07 | −17.77 | −5.03 | −5.01 | −1.60 |
| miR-92a-2* | GGGTGGGGATTTGTTGCATTAC | 1704 | 56 | −2.01 | −4.24 | −5.49 | −2.24 | −6.01 | −2.74 |
| miR-92b* | AGGGACGGGACGCGGTGCAGTG | 1705 | 50 | −11.88 | −11.88 | −7.35 | −2.61 | −5.68 | −1.07 |
| miR-98 | TGAGGTAGTAAGTTGTATTGTT | 1706 | 50 | −1.51 | −4.47 | −2.57 | −1.99 | −2.20 | 1.13 |
| miR-99a | AACCCGTAGATCCGATCTTGTG | 1707 | 50 | −1.63 | −10.35 | 1.26 | −4.62 | −4.12 | −3.20 |

TABLE 24
Target RNAs present at at least 5-fold decreased levels in at least 50% of tumor samples (con't)

| Gene | Adk40 | Adk41 | Adk49 | Epi42 | Ksarc19 | Kmalp21 | Kmalp25 | EPI-4 | Kmalp44 | Scc27 | Lcnec31 | Car13 |
|---|---|---|---|---|---|---|---|---|---|---|---|---|
| 10010_B- | −8.97 | −3.24 | −2.01 | −1.22 | −1.01 | 1.17 | −4.47 | 1.82 | −4.06 | −1.50 | −2.18 | −10.58 |
| L4-1 | | | | | | | | | | | | |
| 10010_D- | −6.36 | −2.67 | 1.05 | 1.34 | 1.42 | −1.02 | −4.33 | 1.72 | −3.11 | −1.85 | −2.76 | −2.21 |
| L4-1 | | | | | | | | | | | | |
| 10010-R2-2 | −10.92 | −10.92 | −10.92 | −10.92 | 1.41 | 1.26 | −2.35 | 1.55 | −1.11 | −1.47 | −1.43 | −10.92 |
| 10030-R5-1 | −1.67 | −6.81 | −6.81 | −6.81 | 1.05 | −1.33 | −1.91 | 3.13 | −6.81 | −1.68 | −1.42 | −6.81 |
| 10145-L5-2 | −2.03 | −2.03 | −1.03 | −2.03 | 3.99 | 1.36 | 2.04 | 8.70 | −2.03 | 2.51 | 2.49 | −2.03 |
| 10231-R3-1 | −5.36 | −4.79 | −1.71 | −1.02 | −2.00 | −3.34 | −3.16 | −1.40 | −2.97 | −2.84 | −3.01 | −1.72 |
| 10260-L5-2 | −13.31 | −13.31 | −1.39 | −1.00 | −1.36 | −1.37 | −2.68 | −13.31 | −1.73 | −1.67 | −1.91 | −13.31 |
| 10333-L5-1 | −6.06 | −5.42 | −2.91 | −1.23 | 2.12 | 1.59 | −3.76 | 3.00 | −3.64 | −2.40 | −2.70 | −2.39 |
| 10342-R2-2 | −21.66 | −4.09 | −1.44 | −1.12 | −1.73 | −1.64 | −2.11 | 1.05 | −2.44 | −1.91 | −1.99 | −2.14 |
| 10345-R5-1 | −38.49 | −2.89 | −2.15 | −1.16 | 2.43 | −1.11 | −3.15 | 2.42 | −2.93 | −1.81 | −2.89 | −2.05 |
| 10374-R3-2 | −33.82 | −2.75 | −1.86 | 1.01 | −1.26 | −1.38 | −4.17 | 1.55 | −2.29 | −2.84 | −2.81 | −1.19 |
| 10435-R5-1 | −2.03 | −2.03 | −2.03 | −2.03 | 2.64 | 1.90 | 1.56 | 1.79 | −2.03 | 1.98 | 2.99 | −2.03 |
| 10533-R5-2 | −2.60 | −2.60 | −2.60 | 4.07 | 3.00 | 2.42 | −2.60 | 5.87 | −2.60 | 1.93 | 1.78 | −2.60 |
| 10543-R5-2 | −2.16 | −2.16 | −2.16 | −2.16 | 6.71 | 3.38 | 1.75 | 2.31 | 3.45 | 2.43 | 2.22 | −2.16 |
| 10578-R5-1 | −21.24 | −21.24 | −1.92 | −1.12 | 1.03 | −1.44 | −3.78 | −2.98 | −2.45 | −2.36 | −2.85 | −21.24 |
| 10818-L5-1 | −21.17 | −21.17 | −4.88 | 1.05 | −2.48 | −3.84 | −3.65 | −2.42 | −21.17 | −3.59 | −3.58 | 1.31 |
| 11370-L5-5 | −5.19 | −2.41 | −1.94 | 1.06 | 2.73 | 1.42 | −3.48 | 2.73 | −2.57 | −1.29 | −2.09 | −2.21 |
| 11605-L5-4 | −2.54 | −2.54 | −2.54 | −2.54 | 7.43 | 3.53 | 1.60 | 9.69 | −2.54 | 2.07 | 1.86 | −2.54 |
| 12184-L4-1 | −10.83 | −2.87 | −1.07 | 1.72 | 1.44 | 1.16 | −2.02 | 2.42 | −10.83 | −1.60 | −1.80 | −10.83 |
| 12184-L5-3 | −5.57 | −5.57 | −1.45 | 2.35 | 1.86 | −5.57 | −1.13 | −5.57 | −5.57 | −1.18 | −1.11 | −5.57 |
| 12224-L4-1 | −3.22 | −3.22 | −3.22 | −3.22 | 2.60 | −1.30 | −1.44 | −1.08 | −3.22 | −2.02 | −3.22 | −3.22 |
| 12361-R5-1 | −23.46 | −2.62 | −1.61 | 1.02 | −1.78 | −2.13 | −3.81 | 1.16 | −2.37 | −2.85 | −3.15 | −1.06 |
| 12691-R5-1 | −67.73 | −4.80 | −3.65 | −1.52 | −1.27 | −1.61 | −5.82 | 1.11 | −3.99 | −2.62 | −3.78 | −7.28 |
| 12692-L5-1 | −44.23 | −4.49 | −2.70 | −1.69 | −2.39 | −2.52 | −4.11 | −1.77 | −4.02 | −3.45 | −3.57 | −15.48 |
| 12693-L5-1 | −7.71 | −3.35 | −1.78 | 1.31 | 1.05 | −1.00 | −4.98 | 2.24 | −3.49 | −2.55 | −2.90 | −1.64 |
| 12694-R5-1 | −47.87 | −4.06 | −2.68 | −1.06 | −1.04 | −1.38 | −3.70 | 2.01 | −3.35 | −2.83 | −3.35 | −47.87 |
| 12696-R5-2 | −3.88 | −3.83 | −1.63 | −1.52 | 1.70 | 1.08 | −2.08 | 2.73 | −2.20 | −1.93 | −2.65 | −1.28 |
| 12697-R5-1 | −27.65 | −2.65 | −2.38 | −1.00 | 1.40 | 2.28 | −3.45 | 2.22 | −2.90 | −2.10 | −3.18 | −1.41 |
| 12699-L5-1 | −29.74 | −5.73 | −1.65 | 1.05 | 1.25 | 1.02 | −2.61 | 2.61 | −1.59 | −1.65 | −1.88 | −29.74 |
| 12701-L5-1 | −3.53 | −21.63 | −2.75 | −1.73 | 1.00 | −1.43 | −4.30 | 1.93 | −3.70 | −2.98 | −3.18 | −5.50 |
| 12703-L5-3 | −5.66 | −2.77 | −1.61 | −1.29 | −1.04 | 1.10 | −3.49 | 1.99 | −2.38 | −1.31 | −2.16 | −2.12 |
| 12704-L5-2 | −23.11 | −2.88 | −1.96 | 1.02 | 1.23 | −1.13 | −3.66 | 1.95 | −3.25 | −1.73 | −2.39 | −3.04 |
| 12713-R5-1 | −8.29 | −6.75 | −2.32 | −1.25 | −2.08 | −3.21 | −5.05 | −1.31 | −3.88 | −3.28 | −3.59 | −2.05 |
| 12722-L5-1 | −10.47 | −4.23 | −1.94 | −1.16 | 1.08 | 1.06 | −3.29 | 1.73 | −2.48 | −1.90 | −1.51 | −1.61 |
| 12723-R5-2 | −18.13 | −18.13 | −1.57 | 1.12 | −1.08 | 1.31 | −3.01 | 3.13 | −18.13 | −2.21 | −2.34 | −18.13 |
| 12725-R5-1 | −22.87 | −10.61 | −1.79 | 1.85 | 1.00 | −1.07 | −3.16 | 2.59 | −1.96 | −2.48 | −4.02 | −22.87 |
| 12731-L5-1 | −14.83 | −14.83 | −3.85 | 1.07 | −1.66 | −1.01 | −3.96 | −1.24 | −14.83 | −3.53 | −3.07 | −2.48 |
| 12900-R5-3 | −8.25 | −8.25 | −8.25 | −8.25 | 3.50 | 1.81 | −1.46 | 7.77 | 1.59 | 1.53 | 1.11 | −8.25 |
| 12904-R5-2 | −9.55 | −9.55 | −1.99 | 1.39 | 2.59 | 1.24 | −1.19 | 3.91 | −2.18 | −1.08 | −1.26 | −9.55 |
| 12910-R5-2 | −4.61 | −4.61 | −4.61 | −4.61 | 3.61 | 3.13 | −1.85 | 4.45 | −4.61 | −1.46 | −1.18 | −4.61 |
| 12925-L5-3 | −2.02 | −2.02 | −2.02 | −2.02 | 5.09 | 2.63 | 1.23 | 1.81 | −2.02 | 2.16 | 1.67 | −2.02 |
| 12932-L5-3 | −2.89 | −8.22 | −8.22 | 1.29 | 4.62 | 1.65 | −2.23 | 4.21 | −8.22 | −1.56 | −1.84 | −8.22 |
| 12939-L5-2 | −2.19 | −2.19 | −2.19 | −1.06 | 2.02 | 3.10 | −1.04 | −2.19 | −2.19 | 1.30 | −2.19 | −2.19 |
| 12947-R5-3 | −1.37 | −13.13 | −2.75 | 1.15 | 1.49 | −1.39 | −4.20 | 1.51 | −28.53 | −2.45 | −3.99 | −28.53 |
| 12975-L5-1 | −2.38 | −1.84 | −1.17 | 1.10 | 1.87 | −1.01 | −2.24 | 3.23 | −2.39 | −1.76 | −2.51 | −1.73 |
| 12981-L5-1 | −4.08 | −4.08 | −4.08 | 3.51 | 1.97 | 1.56 | −1.29 | −4.08 | −4.08 | −1.06 | −1.09 | −4.08 |
| 12981-R5-1 | −9.73 | 1.26 | 1.11 | 3.25 | 1.24 | −1.83 | −2.07 | 1.61 | −2.36 | −1.79 | −2.49 | −1.21 |
| 12998-R5-1 | −12.85 | −12.85 | −12.85 | −1.18 | −2.37 | −4.23 | −4.62 | −12.85 | −12.85 | −4.10 | −7.18 | 1.18 |
| 13004-R5-1 | −1.80 | −3.58 | −1.64 | −1.52 | 1.04 | −1.21 | −2.31 | 3.54 | −1.93 | −1.18 | −1.69 | −40.23 |
| 13047-R5-2 | −2.69 | −2.69 | −2.69 | −2.69 | 1.26 | 1.69 | 1.72 | 3.11 | −2.69 | 1.66 | 1.70 | −2.69 |
| 13050-R5-4 | −15.79 | −3.48 | −3.24 | −1.11 | 2.03 | −1.04 | −4.41 | 2.22 | −3.65 | −3.00 | −3.58 | −7.48 |
| 13052-L5-1 | −26.92 | −2.48 | −1.98 | −9.42 | 3.17 | 1.94 | −3.50 | 4.57 | −5.44 | −1.79 | −2.31 | 1.31 |
| 13066-R5-2 | −2.42 | −2.42 | −1.04 | 12.45 | 2.07 | −1.35 | 1.13 | 3.64 | −2.42 | 1.57 | −2.42 | −2.42 |
| 13072-L5-2 | −30.88 | −3.39 | −4.96 | 1.35 | −1.14 | −1.69 | −4.40 | 1.45 | −3.40 | −2.95 | −4.79 | −30.88 |
| 13075-L5-1 | −6.29 | −6.29 | −3.13 | 1.76 | 1.50 | 1.06 | −1.59 | 3.33 | 1.36 | −1.09 | −1.21 | −6.29 |
| 13089-L5-2 | −2.76 | −2.76 | −2.76 | 1.48 | 2.89 | 1.67 | −1.18 | 4.44 | −2.76 | 1.25 | −1.25 | −2.76 |
| 13091-L5-2 | −17.46 | −17.46 | −17.46 | −1.31 | −1.66 | −2.34 | −4.61 | 1.68 | −2.00 | −2.90 | −3.09 | −17.46 |
| 13093-L5-2 | −20.22 | −3.83 | −1.31 | 1.02 | −1.19 | −1.65 | −4.19 | 1.23 | −2.08 | −2.08 | −2.36 | −20.22 |
| 13095-R5-1 | −10.16 | −4.78 | −2.40 | 1.37 | 3.83 | −1.01 | −2.18 | 2.72 | −10.16 | −1.67 | −1.88 | −10.16 |
| 13097-L5-2 | −7.34 | −1.77 | −1.58 | 1.04 | 1.73 | −1.12 | −3.12 | 2.57 | −1.98 | −1.76 | −2.44 | −8.77 |
| 13110-R5-1 | −4.98 | −4.98 | −4.98 | 4.37 | 1.73 | 1.02 | −1.82 | 2.20 | −4.98 | −1.44 | −2.75 | −4.98 |
| 13115-L5-3 | −32.34 | −4.43 | −16.43 | −1.11 | 1.45 | −1.55 | −5.01 | 1.38 | −4.43 | −3.15 | −4.39 | −32.34 |
| 13119-R5-2 | −6.15 | −3.15 | −2.12 | −1.61 | −1.06 | −1.15 | −2.81 | 1.90 | −2.31 | −1.75 | −1.75 | −1.55 |
| 13124-L5-1 | −24.48 | −1.59 | −1.32 | 1.76 | 3.40 | 1.31 | −2.81 | 9.22 | −1.36 | −1.46 | −2.20 | −24.48 |
| 13129-L5-3 | −47.98 | −6.80 | −1.76 | −15.40 | −1.17 | 3.16 | −3.45 | 7.03 | −18.45 | −2.26 | −2.30 | −13.71 |
| 13130-L5-1 | −8.62 | −2.94 | −1.75 | 1.88 | 1.49 | 3.62 | −2.87 | 1.74 | −2.79 | −1.89 | −2.85 | −1.53 |
| 13135-R5-1 | −23.43 | −23.43 | −2.06 | 1.34 | 1.63 | −1.41 | −3.42 | 1.76 | −2.53 | −2.77 | −3.89 | −3.94 |
| 13136-L5-3 | −6.86 | −6.86 | −6.86 | −6.86 | 1.35 | −2.00 | −2.05 | 1.67 | −6.86 | 1.09 | −1.16 | −6.86 |
| 13137-L5-1 | −11.97 | −2.58 | −1.60 | 1.04 | 1.90 | 1.04 | −2.52 | 3.20 | −2.24 | −1.54 | −2.07 | −5.87 |
| 13138-R5-1 | −5.15 | −3.33 | −3.23 | −1.50 | −1.38 | −1.56 | −5.50 | 1.32 | −4.04 | −2.61 | −3.13 | −4.48 |
| 13163-R5-1 | −10.02 | −3.08 | −1.87 | 2.52 | 1.68 | −1.32 | −3.55 | 1.41 | −4.70 | −2.94 | −4.38 | −3.99 |
| 13164-L5-1 | −5.10 | −5.10 | −5.10 | 4.48 | 4.67 | 1.58 | −1.49 | 3.96 | −5.10 | −1.16 | −2.30 | −5.10 |
| 13166-L5-1 | −37.14 | −3.17 | −2.98 | −1.24 | −1.26 | −2.36 | −4.64 | 1.43 | −3.21 | −3.95 | −4.48 | −2.43 |
| 13181-L5-1 | −7.92 | −7.92 | −7.92 | 1.65 | 1.40 | 2.36 | −2.28 | 5.58 | −2.57 | −2.04 | −1.63 | −7.92 |
| 13184-L5-1 | −2.31 | −2.31 | −2.31 | 4.42 | 1.67 | −1.23 | 1.05 | 5.81 | −2.31 | 1.90 | −1.17 | −2.31 |
| 13186-R5-2 | −26.53 | −4.05 | −9.42 | −1.04 | 2.59 | 1.05 | −2.83 | 1.85 | −9.17 | −2.40 | −4.24 | 1.98 |
| 13195-L5-3 | −23.57 | −2.07 | −2.02 | 1.48 | 2.78 | 1.09 | −2.90 | 1.89 | −2.32 | −2.10 | −2.13 | −2.45 |
| 13199-R5-1 | −8.02 | −2.26 | 1.36 | 1.62 | 3.08 | 1.12 | −2.13 | 4.07 | −1.08 | −1.86 | −1.57 | −8.02 |
| 13202-L5-1 | 1.16 | −10.20 | 1.03 | 1.38 | 1.62 | −1.35 | −2.12 | 2.03 | −10.20 | −1.77 | −2.12 | −10.20 |
| 13202-R5-2 | −14.39 | −1.40 | 1.14 | 3.25 | 1.30 | −1.53 | −2.85 | 1.55 | −1.85 | −2.70 | −3.38 | −14.39 |
| 13209-L5-2 | −45.23 | −3.07 | −1.52 | 1.00 | −1.08 | −1.54 | −3.29 | 1.39 | −2.21 | −1.88 | −2.01 | −4.56 |
| 13209-R5-3 | −12.46 | −6.49 | 1.10 | 1.57 | −1.68 | −2.00 | −1.94 | 1.42 | −1.36 | −1.64 | −2.04 | −12.46 |
| 13211-L5-1 | −31.07 | −2.60 | −1.64 | −1.17 | −1.32 | −1.51 | −4.08 | 1.30 | −2.71 | −1.84 | −2.39 | −10.90 |
| 13220-L5-3 | −6.86 | −10.00 | −2.35 | −1.04 | −1.08 | −2.44 | −4.02 | 1.22 | −2.77 | −2.46 | −2.77 | 1.00 |
| 13229-L5-1 | −29.36 | −2.91 | −1.85 | −1.07 | 1.36 | 1.32 | −2.81 | 2.19 | −2.21 | −1.91 | −2.31 | −1.02 |
| 13230-L5-4 | −2.05 | −2.05 | −1.17 | −2.05 | 3.16 | 2.18 | 1.59 | 6.65 | −1.14 | 2.50 | −1.02 | −2.05 |
| 13231-L5-2 | −16.99 | −3.66 | −1.24 | −1.09 | −1.39 | −1.43 | −3.76 | 1.62 | −1.61 | −1.25 | −2.31 | −16.99 |
| 13237-L5-4 | −35.36 | −35.36 | −3.55 | −1.11 | 1.31 | −1.52 | −5.02 | 1.37 | −4.63 | −3.23 | −4.11 | −35.36 |
| 13239-L5-2 | −39.77 | −7.37 | −3.11 | −1.12 | 2.53 | 1.22 | −3.59 | 3.98 | −3.01 | −2.21 | −3.96 | −39.77 |
| 13240-L5-2 | −18.39 | −4.67 | −2.06 | −1.28 | −1.62 | −1.59 | −3.66 | 1.21 | −3.23 | −2.56 | −2.62 | −2.75 |
| 13241-L5-2 | −10.26 | −4.55 | −4.91 | 1.77 | 1.77 | −1.36 | −2.23 | 3.91 | −3.60 | −1.33 | −4.77 | −10.26 |
| 13251-R5-2 | −20.00 | −3.70 | −3.53 | 1.00 | 1.38 | −1.26 | −4.35 | 1.58 | −4.26 | −2.42 | −3.46 | −2.91 |
| 13259-R5-1 | −3.29 | −3.29 | −3.29 | −3.29 | 2.53 | 1.88 | −1.19 | −3.29 | −3.29 | 1.28 | 1.08 | −3.29 |
| 13267-L5-1 | −30.85 | −13.05 | −1.69 | −10.20 | 1.96 | 3.35 | −1.63 | 8.62 | −12.76 | −1.63 | −2.04 | −9.14 |
| 13281-L5-3 | 1.06 | −1.86 | −1.81 | −1.07 | 1.11 | −1.64 | −3.92 | 1.69 | −1.24 | −2.19 | −3.54 | −6.83 |
| 13283-L5-3 | −13.68 | −3.86 | −2.82 | −1.06 | 1.13 | −1.43 | −1.92 | 2.27 | −1.49 | −1.44 | −1.67 | −6.16 |
| 13285-L5-3 | −11.84 | −4.28 | −2.47 | −1.21 | −1.65 | −1.98 | −4.63 | −1.22 | −3.72 | −2.67 | −3.38 | −1.41 |
| 13287-L5-3 | −27.01 | −1.81 | −1.63 | −1.11 | 2.16 | 1.08 | −3.42 | 2.88 | −2.45 | −1.53 | −2.25 | −1.07 |
| 13291-L5-1 | −5.33 | −8.08 | −1.21 | 1.10 | 5.56 | 2.15 | −2.09 | 6.10 | −1.56 | 1.04 | −1.83 | −5.77 |
| 13293-L5-1 | −18.63 | −18.63 | −1.65 | 1.07 | 1.04 | −1.36 | −3.93 | 2.07 | −2.11 | −1.84 | −2.35 | −18.63 |
| 13298-R5-1 | −14.82 | −14.82 | −3.48 | 1.05 | 1.24 | −1.67 | −3.79 | 1.78 | −14.82 | −2.80 | −3.15 | −14.82 |
| 13303-L5-3 | −14.35 | −7.42 | −1.08 | 1.87 | 3.44 | 1.82 | −2.05 | 3.33 | 1.08 | 1.03 | −1.75 | −14.35 |
| 13308-L5-1 | −14.43 | −1.49 | −1.10 | 1.30 | 3.61 | 1.10 | −2.16 | 2.74 | −1.69 | −1.36 | −1.79 | −14.43 |
| 13310-R5-1 | −6.22 | −6.22 | −6.22 | 1.86 | −1.03 | −1.50 | −1.67 | 3.20 | 1.44 | 2.11 | −1.28 | −6.22 |
| 13312-L5-2 | −14.33 | −2.46 | −2.40 | −1.24 | 3.55 | 1.50 | −3.72 | 3.22 | −3.06 | −2.08 | −2.68 | −1.53 |
| 13313-L5-2 | −8.53 | −2.34 | −1.67 | 1.70 | 1.40 | −1.33 | −2.46 | 2.18 | −2.74 | −1.65 | −2.66 | −4.35 |
| 13316-R5-2 | −4.30 | −4.30 | −2.20 | 2.94 | 1.96 | 3.07 | −1.31 | 4.09 | 1.82 | 2.30 | 1.24 | −4.30 |
| 13326-L5-2 | −52.63 | −3.83 | −2.70 | −1.22 | 1.72 | 1.01 | −3.47 | 2.34 | −3.63 | −2.53 | −3.07 | −1.23 |
| 13328-R5-2 | −14.53 | −14.53 | −3.23 | 1.52 | −1.14 | −1.34 | −2.95 | 1.56 | −1.83 | −2.66 | −2.68 | −14.53 |
| 13332-L5-1 | −4.39 | −4.39 | −2.11 | 2.76 | 2.77 | 1.33 | −1.10 | −1.46 | −4.39 | 1.18 | −1.07 | −1.98 |
| 13334-L5-3 | −43.43 | −2.48 | −4.73 | 1.14 | 3.67 | 1.66 | −3.78 | 3.22 | −3.11 | −1.94 | −2.34 | 1.24 |
| 13335-L5-3 | −4.23 | −3.07 | −1.86 | 1.27 | 1.43 | −1.36 | −3.29 | 1.75 | −2.97 | −1.67 | −2.59 | −1.75 |
| 13337-L5-2 | −42.63 | −15.36 | −1.48 | −11.45 | 3.39 | 1.31 | −3.13 | 2.96 | −16.82 | −2.38 | −3.47 | 1.92 |
| 13339-L5-1 | −3.11 | −3.86 | −2.52 | −1.15 | −2.17 | −2.18 | −3.10 | −1.68 | −3.33 | −2.51 | −2.85 | −1.46 |
| 13343-L5-1 | −5.44 | −2.70 | −1.77 | 1.12 | 2.31 | 1.34 | −2.98 | 3.06 | −2.38 | −1.38 | −1.82 | −1.09 |
| 13349-L5-2 | −10.66 | −3.95 | −2.27 | −1.24 | −1.33 | −2.25 | −4.40 | 1.03 | −3.81 | −2.98 | −3.14 | −1.13 |
| 13353-L5-2 | −2.24 | −2.24 | −2.24 | −2.24 | 1.70 | 5.74 | 1.55 | 1.27 | 2.75 | 2.47 | 1.48 | −2.24 |
| 13354-L5-1 | −17.63 | −10.31 | −17.63 | 1.04 | −1.29 | −1.42 | −4.54 | 1.52 | −3.25 | −3.11 | −4.57 | −17.63 |
| 13355-L5-2 | −5.51 | −5.51 | −5.51 | 1.73 | 1.33 | 2.51 | −2.60 | 1.56 | −5.51 | −2.00 | −5.51 | −5.51 |
| 13356-L5-2 | −8.37 | −8.37 | 1.15 | −8.37 | 1.19 | −1.16 | −1.71 | 2.41 | −2.44 | −1.56 | −1.28 | −8.37 |
| 13358-L5-2 | −23.01 | −4.99 | −4.83 | 1.29 | 1.72 | −1.44 | −3.50 | 1.29 | −10.96 | −2.15 | −3.31 | −23.01 |
| 13361-L5-1 | −12.93 | −12.93 | −12.93 | −1.25 | −1.51 | −2.03 | −3.61 | 1.42 | −1.98 | −2.17 | −1.96 | −12.93 |
| 13363-L5-2 | −20.98 | −20.98 | −20.98 | −1.40 | −1.39 | −2.08 | −4.73 | 1.11 | −2.88 | −2.56 | −2.49 | −20.98 |
| 13364-L5-2 | −7.47 | −7.47 | −3.52 | −7.47 | −1.24 | −2.33 | −2.43 | 3.10 | −7.47 | −1.78 | −1.46 | −7.47 |
| 13365-L5-3 | −7.56 | −3.41 | −1.76 | 1.61 | 1.56 | −1.00 | −3.01 | 1.80 | −2.88 | −1.74 | −2.58 | −1.78 |
| 13370-L5-2 | −27.25 | −1.67 | −1.39 | 1.09 | 1.33 | −1.16 | −2.69 | 2.19 | −2.79 | −1.56 | −2.12 | −1.10 |
| 13373-L5-4 | −3.08 | −7.98 | −2.22 | 1.02 | 2.43 | 1.76 | −2.02 | 3.28 | −1.55 | 1.04 | −1.31 | −7.98 |
| 13374-R5-1 | −35.28 | −7.46 | −2.24 | −1.53 | −1.13 | −1.31 | −3.05 | 1.69 | −2.75 | −2.15 | −2.18 | −5.68 |
| 13375-L5-3 | −41.40 | −3.21 | −2.13 | −1.40 | −1.08 | −1.32 | −4.62 | 1.77 | −3.47 | −1.85 | −2.99 | −15.84 |
| 13376-R5-1 | −46.25 | −2.90 | −3.40 | 1.26 | 1.17 | −1.77 | −3.98 | 1.62 | −5.25 | −4.65 | −5.47 | −46.25 |
| 13380-R5-3 | −10.07 | −10.07 | −1.12 | 1.07 | −1.25 | −1.49 | −2.40 | 1.95 | −10.07 | −2.00 | −1.88 | −10.07 |
| 13385-L5-1 | −3.98 | −3.98 | −3.98 | 2.74 | 3.39 | 3.77 | −1.37 | −1.25 | −3.98 | 1.45 | 1.01 | −3.98 |
| 13396-L5-2 | −51.56 | −3.50 | −3.03 | −1.02 | 1.19 | −1.18 | −3.70 | 2.12 | −3.31 | −2.34 | −2.84 | −19.22 |
| 13403-L5-1 | −21.42 | −1.77 | −1.59 | 2.39 | 2.56 | −1.10 | −2.29 | 1.93 | −2.00 | −2.82 | −3.69 | −21.42 |
| 13412-L5-1 | −8.32 | −8.32 | 1.16 | 1.31 | −1.47 | −1.43 | −2.06 | 1.69 | −8.32 | −1.83 | −1.40 | −8.32 |
| 13423-L5-3 | −9.37 | −2.67 | −1.70 | 2.74 | 1.65 | −1.49 | −3.52 | 1.30 | −3.67 | −2.44 | −3.89 | −4.22 |
| 13425-L5-3 | −8.40 | −2.50 | −1.76 | 3.00 | 1.76 | −1.51 | −3.88 | 1.20 | −4.15 | −2.68 | −4.80 | −4.43 |
| 13430-L5-3 | −3.90 | −3.61 | −2.27 | −1.01 | 3.74 | 1.98 | −3.74 | 5.44 | −1.77 | −2.17 | −3.43 | −18.09 |
| 13431-L5-3 | −4.88 | −6.00 | −2.06 | 1.01 | −2.24 | −3.42 | −4.62 | −1.58 | −3.62 | −3.19 | −4.73 | −1.29 |
| 13432-R5-1 | −17.04 | −1.33 | 1.36 | 3.21 | 2.17 | 1.38 | −2.00 | 2.50 | 1.55 | −1.06 | −2.15 | −17.04 |
| 13456-R5-2 | −14.18 | −14.18 | 2.87 | −6.32 | 1.05 | 1.63 | −2.07 | 5.81 | −4.94 | −1.19 | −1.58 | −14.18 |
| 13458-R5-2 | −9.56 | −9.56 | 1.53 | −4.22 | 4.25 | −1.29 | −1.67 | 10.75 | −3.73 | −1.02 | −1.10 | −9.56 |
| 13461-L5-4 | −70.04 | −4.10 | −2.14 | −1.39 | 1.18 | −1.05 | −3.94 | 2.59 | −2.51 | −2.43 | −2.91 | −2.77 |
| 13463-L5-2 | −18.40 | −3.50 | −2.21 | 1.89 | 1.41 | −1.11 | −3.17 | 2.39 | −3.17 | −2.66 | −4.28 | −25.56 |
| 13489-L5-1 | −2.32 | −2.32 | 4.10 | 7.21 | 1.60 | 1.78 | −1.10 | −2.32 | 1.73 | −2.32 | −2.32 | −2.32 |
| 13497-L5-1 | −7.23 | −4.09 | −3.08 | 1.16 | 1.64 | 1.09 | −4.05 | 1.93 | −4.13 | −2.92 | −4.09 | −3.23 |
| 13513-L5-1 | −3.48 | −3.48 | 4.44 | −3.48 | 1.38 | 2.30 | 1.03 | 4.31 | 2.43 | 1.49 | 2.28 | −3.48 |
| 13519-L5-1 | −8.34 | −8.34 | −4.66 | 1.28 | 1.53 | −1.40 | −2.94 | 2.21 | −8.34 | −2.08 | −1.85 | −8.34 |
| 13525-L5-2 | −11.76 | −11.76 | −2.97 | 1.16 | 1.18 | −1.56 | −3.63 | 1.43 | −11.76 | −1.93 | −2.26 | −4.62 |
| 25-R5-1 | −13.46 | −13.46 | 1.75 | 1.51 | 3.69 | 1.86 | −1.81 | 3.93 | −1.29 | −1.53 | −2.27 | −13.46 |
| 266-R5-2 | −5.40 | −3.19 | −2.35 | 1.20 | 3.10 | 1.60 | −3.19 | 3.09 | −2.31 | −1.95 | −3.02 | −3.07 |
| 2786-L5-3 | −7.14 | −7.14 | −1.80 | 1.48 | 1.86 | −1.31 | −2.37 | 2.47 | −7.14 | −1.82 | −1.48 | −7.14 |
| 2811-R5-1 | −5.19 | −5.19 | −5.19 | −5.19 | 1.07 | −1.12 | −1.90 | 2.46 | −5.19 | −1.53 | −1.19 | −5.19 |
| 2819-R5-4 | −5.51 | −5.80 | −2.51 | −1.25 | −2.51 | −3.80 | −5.86 | −1.79 | −4.40 | −3.96 | −6.14 | −1.09 |
| 3717-L5-2 | −10.28 | −3.32 | −2.43 | 1.83 | 1.05 | 1.36 | −5.47 | 2.60 | −5.09 | −3.62 | −5.62 | −1.15 |
| 3732-R5-1 | −13.70 | −1.52 | −1.09 | 1.37 | 1.34 | 1.51 | −2.32 | −1.64 | −1.65 | −1.02 | −2.09 | −4.30 |
| 3799-R5-1 | −6.12 | −2.70 | −1.95 | 1.54 | 1.37 | 1.25 | −2.90 | 2.68 | −2.69 | −1.77 | −2.48 | −8.74 |
| 3897-R5-2 | −8.76 | −5.74 | −2.75 | −1.70 | −1.02 | 1.56 | −3.91 | 1.41 | −3.43 | −2.66 | −2.84 | −2.33 |
| 3942-L5-1 | −4.60 | −1.85 | −1.50 | 2.56 | 2.76 | 1.21 | −2.11 | 2.61 | −2.13 | −2.30 | −3.87 | −53.73 |
| 3952-L3-1 | −7.09 | −1.94 | −1.94 | 1.81 | −1.05 | 1.07 | −2.42 | 1.66 | −7.09 | −2.27 | −1.92 | −7.09 |
| 3953-R3-2 | −7.36 | −4.86 | −2.14 | −1.41 | −1.64 | −1.73 | −3.38 | 1.20 | −3.51 | −2.26 | −3.09 | −1.13 |
| 3966-L5-1 | −9.29 | −5.96 | −2.17 | −1.13 | −1.86 | −2.86 | −3.59 | −1.09 | −3.21 | −2.58 | −3.27 | −2.45 |
| 3995-L2-2 | −25.12 | −2.66 | 2.34 | 1.82 | 2.48 | 1.95 | −2.10 | 4.87 | 4.02 | −1.04 | −1.85 | −25.12 |
| 4013-L4-1 | −2.19 | −1.14 | −1.19 | 5.14 | 1.52 | −1.25 | −2.19 | −2.19 | −2.19 | −2.19 | −2.19 | −2.19 |
| 4026-R5-1 | −5.56 | −3.29 | −2.88 | 1.85 | 1.58 | −1.41 | −3.53 | −81.69 | −5.46 | −4.37 | −5.89 | −81.69 |
| 4026-R5-2 | −7.79 | −3.53 | −2.44 | 2.12 | 1.69 | −1.02 | −3.26 | 1.98 | −4.14 | −3.33 | −5.34 | −145.60 |
| 410-R5-1 | −5.18 | −5.18 | −5.18 | −5.18 | 2.41 | 1.08 | −1.67 | 4.07 | −5.18 | −1.60 | −1.13 | −5.18 |
| 4130-L5-1 | −18.42 | −18.42 | −4.29 | −1.07 | −2.00 | −3.97 | −4.12 | −1.60 | −18.42 | −3.45 | −3.62 | 1.01 |
| 4143-R5-2 | −3.75 | −3.75 | −3.75 | −3.75 | 3.84 | 1.77 | −1.16 | 6.22 | −3.75 | 1.61 | 1.47 | −3.75 |
| 4258-L5-1 | −2.02 | −2.02 | −2.02 | −2.02 | 5.96 | 3.36 | 1.46 | 8.78 | −2.02 | 2.12 | 2.15 | −2.02 |
| 4315_C- | −26.61 | −2.74 | −1.68 | 1.24 | 1.19 | 1.14 | −4.07 | −84.00 | −3.03 | −1.71 | −2.46 | −2.12 |
| L4-1 | | | | | | | | | | | | |
| 4315_D- | −52.47 | −4.05 | −1.59 | −1.06 | −1.09 | −1.34 | −4.58 | 1.76 | −3.29 | −2.93 | −3.35 | −16.76 |
| R4-1 | | | | | | | | | | | | |
| 4315_E- | −14.07 | −3.05 | 1.21 | −1.02 | 1.93 | 1.81 | −2.20 | 4.06 | −1.31 | −1.04 | 1.16 | −2.25 |
| R4-1 | | | | | | | | | | | | |
| 4315_F- | −6.50 | −3.14 | −1.75 | −1.35 | 1.89 | 1.09 | −3.03 | 2.07 | −2.72 | −1.88 | −2.15 | −2.00 |
| R4-1 | | | | | | | | | | | | |
| 4315_I-L4-1 | −24.12 | −2.69 | −1.62 | −1.14 | 1.34 | 1.53 | −3.47 | 3.10 | −2.18 | −1.55 | −1.78 | −24.12 |
| 4315_K- | −11.95 | −3.76 | −1.84 | −1.67 | 1.11 | −1.40 | −5.02 | 1.91 | −2.86 | −2.79 | −3.01 | −1.07 |
| L4-1 | | | | | | | | | | | | |
| 4315-R3-2 | −18.48 | −18.48 | −1.57 | −1.08 | 1.94 | 1.17 | −2.31 | 3.55 | −1.46 | −1.77 | −1.94 | −18.48 |
| 4338-L5-2 | −2.07 | −1.04 | −2.07 | 6.34 | −1.05 | 2.04 | 1.12 | −2.07 | 3.52 | −1.27 | −2.07 | −2.07 |
| 4340-R3-1 | −5.28 | −5.28 | −2.74 | 1.96 | 1.91 | 1.22 | −1.42 | 3.91 | −5.28 | −1.09 | −1.05 | −5.28 |
| 4346-L5-1 | −4.26 | −3.59 | −2.40 | −1.31 | 1.61 | 1.08 | −2.87 | 2.65 | −2.47 | −1.51 | −1.60 | −2.44 |
| 4361-R5-1 | −16.06 | −3.21 | −2.18 | 1.15 | 2.56 | 1.70 | −1.98 | 4.81 | −16.06 | −1.30 | −1.94 | −5.13 |
| 4498-L3-2 | −9.82 | −5.38 | 1.41 | 1.75 | 1.02 | −1.42 | −1.96 | 2.19 | −1.12 | −1.31 | −1.02 | −9.82 |
| 4516-L5-1 | −14.82 | −6.92 | −14.82 | 1.39 | 1.36 | −1.61 | −3.67 | 1.30 | −14.82 | −3.07 | −3.34 | −14.82 |
| 454-R5-1 | −2.62 | −2.62 | −2.62 | −2.62 | 3.88 | 1.74 | 1.02 | 6.55 | −2.62 | 1.18 | −1.32 | −2.62 |
| 4593-R5-1 | −38.50 | −3.52 | −1.40 | −1.57 | 1.21 | 3.25 | −2.72 | 7.52 | −2.16 | −1.91 | −2.36 | −38.50 |
| 4610-R5-1 | −7.69 | −7.69 | −4.23 | −7.69 | 1.05 | −1.38 | −2.23 | 2.29 | −7.69 | −1.85 | −1.57 | −7.69 |
| 4610-R5-2 | −3.23 | −3.23 | −1.64 | −3.23 | 4.54 | 1.72 | 1.06 | 6.67 | −3.23 | 1.85 | 1.59 | −3.23 |
| 4642-R3-2 | −10.25 | −10.25 | −5.37 | 1.32 | −1.09 | −1.37 | −2.03 | 1.75 | −10.25 | −1.52 | −1.92 | −10.25 |
| 4666-R5-1 | −52.31 | −8.64 | −2.97 | −1.02 | 3.07 | 1.24 | −3.80 | 4.13 | −2.83 | −3.00 | −4.54 | −20.59 |
| 4792-L5-2 | −8.62 | −2.62 | −1.48 | 1.58 | 1.24 | −1.03 | −2.41 | 3.62 | −1.95 | −1.54 | −2.22 | −24.82 |
| 4801-L5-2 | −4.53 | −4.53 | −2.30 | 2.06 | 1.80 | 1.04 | −1.18 | 2.99 | −4.53 | 1.18 | 1.17 | −4.53 |
| 4813-R3-1 | −3.33 | −3.33 | −3.33 | 1.39 | 1.45 | −1.77 | −1.46 | −3.33 | −3.33 | −1.07 | −3.33 | −1.06 |
| 4875-R2-2 | −25.83 | −2.14 | −1.33 | 1.90 | 1.88 | 1.16 | −2.27 | 2.53 | −1.98 | −1.34 | −2.73 | −25.83 |
| 4912-L5-2 | −19.46 | −19.46 | −1.91 | −1.29 | −1.45 | −1.96 | −2.67 | 1.56 | −2.21 | −2.67 | −2.47 | −19.46 |
| 4929-R4-1 | −11.74 | −11.74 | −11.74 | 1.31 | −2.37 | −2.86 | −4.16 | −1.03 | −11.74 | −3.58 | −2.44 | −11.74 |
| 5032-R5-1 | −13.13 | −13.13 | −6.46 | −1.03 | 1.10 | −1.14 | −2.75 | 2.43 | −13.13 | −1.83 | −1.91 | −13.13 |
| 5048-L5-1 | −11.59 | −11.59 | −1.39 | 1.05 | −1.30 | −1.54 | −3.38 | 1.08 | −6.02 | −1.58 | −2.26 | −11.59 |
| 5071-R5-2 | −7.99 | −3.93 | −3.06 | −1.63 | −1.09 | −1.22 | −4.17 | 1.01 | −3.96 | −1.64 | −2.24 | −3.88 |
| 5107-L5-1 | −26.66 | −1.96 | −1.85 | 1.79 | 1.96 | 1.08 | −3.02 | 3.02 | −1.40 | −2.20 | −3.10 | −26.66 |
| 5210-L5-1 | −7.99 | −7.99 | 1.22 | 1.47 | −1.11 | −1.13 | −2.48 | 1.72 | −7.99 | −1.31 | −2.28 | −7.99 |
| 5342-L5-1 | −1.33 | −1.69 | −1.29 | 1.18 | −1.19 | −2.25 | −2.81 | 1.02 | −1.76 | −2.17 | −2.61 | −6.40 |
| 5491-R5-1 | −8.97 | −3.43 | −1.87 | 1.26 | −2.01 | −3.08 | −3.05 | −1.22 | −2.81 | −3.09 | −4.36 | 1.32 |
| 5521-L5-2 | −7.60 | −7.60 | 1.16 | 3.47 | 2.17 | −1.21 | −1.91 | 2.12 | −7.60 | −1.57 | −1.79 | −7.60 |
| 554-R5-1 | −8.55 | −2.59 | −1.73 | 2.95 | 1.77 | −1.55 | −3.52 | 1.23 | −4.27 | −2.77 | −4.42 | −5.30 |
| 5554-R5-2 | −28.10 | −1.55 | −1.48 | 1.18 | 1.34 | −1.27 | −3.63 | 1.83 | −2.03 | −2.07 | −3.04 | −2.37 |
| 5638-R5-2 | −8.67 | −2.30 | −2.11 | 2.48 | 1.70 | −1.46 | −4.40 | 1.36 | −3.47 | −2.78 | −4.60 | −4.20 |
| 5640-L3-1 | −11.16 | −2.70 | −1.45 | 1.39 | 1.59 | 1.12 | −3.47 | 2.10 | −2.10 | −1.71 | −2.50 | −35.95 |
| 5749-R5-1 | −3.50 | −3.50 | −1.65 | 7.88 | 3.53 | 2.22 | 1.19 | −3.50 | −3.50 | −1.07 | −3.50 | −3.50 |
| 5757-L5-1 | −22.78 | −22.78 | −4.13 | 1.16 | −2.40 | −6.68 | −3.91 | −22.78 | −22.78 | −4.48 | −4.14 | 1.71 |
| 5854-R5-2 | −8.37 | −2.42 | −1.59 | 3.10 | 1.90 | −1.20 | −2.79 | 1.86 | −3.32 | −2.33 | −3.25 | −4.60 |
| 5956-L5-1 | −1.50 | −1.19 | −8.83 | −3.12 | 1.38 | 1.74 | −1.28 | −1.96 | −8.83 | −1.21 | −3.33 | 1.37 |
| 5995-R5-1 | −2.29 | −2.29 | −2.29 | −2.29 | 3.85 | 1.13 | −2.29 | 4.79 | −2.29 | −1.51 | −2.29 | −2.29 |
| 6008-R5-1 | −9.71 | −9.71 | −9.71 | 1.21 | −1.27 | −2.19 | −3.80 | 1.01 | −9.71 | −2.70 | −5.17 | −9.71 |
| 6008-R5-2 | −5.41 | −5.41 | −2.83 | 1.90 | 1.17 | −5.41 | −2.24 | −5.41 | −5.41 | −1.58 | −1.86 | −5.41 |
| 6016-R2-1 | −12.02 | −12.02 | −2.83 | −1.03 | 1.09 | −1.29 | −2.43 | 2.59 | −1.53 | −1.37 | −1.49 | −12.02 |
| 6023-L5-1 | −19.11 | −4.43 | −9.06 | 1.64 | −1.55 | −1.76 | −4.04 | 1.19 | −2.84 | −3.49 | −3.47 | −19.11 |
| 6087-L4-1 | −8.97 | −8.97 | −4.56 | −8.97 | 1.20 | −1.22 | −2.10 | 1.95 | −8.97 | −1.82 | −2.11 | −8.97 |
| 6096-R5-1 | −12.65 | −12.65 | −6.35 | −12.65 | −2.12 | 1.96 | −4.37 | 3.74 | −12.65 | −3.78 | −3.17 | −12.65 |
| 6192-L5-1 | −13.47 | −13.47 | 2.69 | 2.33 | 1.51 | −1.93 | −1.74 | 4.14 | −4.25 | −1.11 | −1.06 | −13.47 |
| 6198-R5-2 | −8.02 | −4.03 | −1.28 | −1.07 | −1.73 | −2.33 | −2.25 | 1.04 | −2.46 | −1.83 | −2.17 | −2.31 |
| 6242-R5-1 | −5.90 | −5.90 | −5.90 | −2.78 | 1.99 | 1.41 | −2.49 | 3.61 | −5.90 | −2.04 | −3.28 | −5.90 |
| 6287-L3-2 | −19.21 | −10.03 | −2.08 | 1.30 | 1.40 | −1.38 | −3.39 | 2.27 | −2.02 | −2.10 | −2.68 | −19.21 |
| 6385-R5-2 | −9.70 | −9.70 | −2.46 | 1.00 | −1.10 | −1.39 | −2.34 | 2.61 | −9.70 | −1.58 | −1.52 | −9.70 |
| 6409-L3-1 | −2.84 | −3.81 | −1.89 | −1.05 | −1.55 | −3.11 | −4.36 | −1.21 | −2.13 | −3.04 | −2.46 | −3.30 |
| 6434-R5-1 | −4.10 | −2.03 | −1.40 | 3.14 | 1.59 | −1.08 | −3.58 | 2.01 | −2.31 | −2.55 | −4.04 | −2.74 |
| 6490-R5-3 | −23.58 | −2.43 | −2.36 | −1.08 | 2.40 | −1.34 | −2.61 | 3.20 | −2.47 | −1.71 | −2.00 | −4.00 |
| 6496-R5-2 | −44.85 | −3.00 | −3.09 | −1.17 | 4.58 | 2.18 | −3.23 | 4.50 | −2.86 | −1.62 | −2.20 | −1.51 |
| 6584-L5-1 | −13.67 | −13.67 | −5.86 | 1.18 | 3.62 | 2.49 | −1.83 | 6.84 | −13.67 | −1.23 | −1.55 | −13.67 |
| 6590-L5-1 | −4.65 | −4.65 | −1.25 | 2.00 | 2.52 | 1.66 | −1.27 | 6.29 | −2.59 | 1.13 | −1.09 | −4.65 |
| 6642-R5-1 | −9.51 | −1.99 | −1.73 | 1.59 | 3.00 | −1.02 | −2.64 | 3.60 | −1.98 | −1.60 | −2.83 | −1.73 |
| 669-R5-2 | −10.57 | −10.57 | −2.81 | 1.09 | −1.32 | 1.39 | −3.80 | 3.58 | −1.86 | −2.58 | −2.81 | −10.57 |
| 6718-L3-2 | −3.98 | −3.98 | −2.18 | 2.26 | 1.29 | −2.03 | −1.58 | −1.57 | −3.98 | 1.66 | −3.98 | −3.98 |
| 6839-L3-1 | −27.98 | −2.76 | −2.51 | −1.37 | 1.05 | −1.33 | −4.23 | 2.43 | −2.96 | −2.29 | −2.78 | −1.52 |
| 6880-L3-2 | −5.32 | −2.54 | −1.25 | 1.77 | 2.00 | 1.81 | −2.74 | 3.05 | −1.32 | −1.35 | −2.78 | −2.32 |
| 6908-L3-2 | −2.84 | −2.84 | 3.97 | 6.90 | 1.33 | 1.57 | −1.04 | −2.84 | 3.32 | −1.05 | −2.84 | −2.84 |
| 6984-R4-1 | −18.59 | −5.09 | −1.67 | 1.15 | 3.57 | 1.76 | −3.55 | 5.19 | −1.99 | −2.34 | −3.28 | −18.59 |
| 7029-R5-1 | −10.64 | −10.64 | −2.56 | 1.54 | 1.33 | −1.01 | −2.23 | 3.16 | −10.64 | −1.40 | −1.44 | −10.64 |
| 7061-R5-2 | −51.92 | −1.69 | −1.36 | −1.17 | 1.39 | 1.10 | −3.67 | 1.94 | −2.85 | −1.51 | −2.19 | −1.73 |
| 7066-R5-1 | −31.19 | −3.44 | −2.16 | 1.08 | −1.50 | −1.75 | −4.12 | 1.47 | −3.39 | −3.33 | −4.27 | −31.19 |
| 7069-R5-1 | −42.68 | −3.22 | −2.52 | 1.02 | 1.34 | −1.32 | −3.98 | 1.59 | −3.33 | −2.47 | −3.14 | −18.77 |
| 7113-R5-1 | −8.52 | −4.48 | −3.59 | 1.23 | 1.60 | −1.25 | −3.50 | 1.53 | −5.21 | −3.87 | −5.23 | −49.48 |
| 7126-L3-1 | −21.53 | −3.22 | 1.09 | −1.52 | 1.21 | 1.28 | −2.18 | 2.92 | −1.66 | −8.94 | −3.88 | −2.59 |
| 7141-R5-1 | −2.31 | −2.31 | −2.31 | −2.31 | 4.83 | 1.97 | −1.07 | 5.66 | −2.31 | 1.32 | −2.31 | −2.31 |
| 7221-R5-1 | −11.70 | −6.14 | −1.36 | −1.00 | −1.61 | −1.41 | −2.93 | 1.25 | −1.75 | −1.65 | −2.19 | −11.70 |
| 7313-L5-2 | −2.26 | −2.26 | −2.26 | −2.26 | 2.68 | 2.29 | 1.59 | 5.74 | −2.26 | 2.36 | 2.07 | −2.26 |
| 7352-R3-2 | −11.09 | −5.02 | 1.09 | 1.44 | 1.44 | 1.64 | −1.96 | 2.77 | −1.31 | 1.60 | −1.15 | −11.09 |
| 7356_A- | −7.06 | −5.54 | −1.95 | −1.05 | −1.74 | −2.76 | −4.73 | −1.20 | −3.41 | −3.22 | −3.51 | −1.25 |
| R4-1 | | | | | | | | | | | | |
| 7356-L5-1 | −17.42 | −17.42 | −1.11 | 1.16 | 1.37 | −1.26 | −3.38 | 2.37 | −1.70 | −1.56 | −2.28 | −17.42 |
| 7367-L1-1 | −5.61 | −5.61 | −2.76 | 2.85 | 2.74 | 1.81 | −1.31 | 3.71 | −5.61 | −1.01 | −1.26 | −5.61 |
| 7384-R3-1 | −16.46 | −3.05 | −1.45 | 1.34 | 3.85 | 1.12 | −2.15 | 2.45 | −1.99 | −1.70 | −2.75 | −1.96 |
| 7411-R3-2 | −13.01 | −2.66 | −1.16 | 1.17 | 1.26 | 1.15 | −2.46 | 2.04 | −1.61 | 1.08 | −1.57 | −13.01 |
| 7569-L5-2 | −3.93 | −3.93 | −3.93 | −3.93 | −1.05 | −1.16 | −1.50 | 2.37 | −3.93 | −1.26 | −3.93 | −3.93 |
| 7571-L5-1 | −32.04 | −3.20 | 1.02 | −1.14 | 1.30 | −1.37 | −2.52 | 2.12 | −2.59 | −1.83 | −3.22 | −1.07 |
| 7572-R5-2 | −22.49 | −2.34 | −1.93 | −1.03 | 6.19 | 2.41 | −2.23 | 5.40 | −2.12 | −1.30 | −1.54 | −1.17 |
| 7660-L5-1 | −18.40 | −4.72 | −1.14 | 1.08 | 1.23 | −1.13 | −2.11 | 2.32 | −1.23 | −1.17 | −1.37 | −18.40 |
| 7702-L2-1 | −33.45 | −17.84 | −3.01 | −1.64 | 1.18 | −1.56 | −5.68 | 1.73 | −3.58 | −3.35 | −3.12 | −14.37 |
| 7736-L5-1 | −10.35 | −10.35 | 1.09 | 2.15 | 1.62 | 1.20 | −1.65 | 4.30 | 1.24 | 1.39 | −1.23 | −10.35 |
| 7743-L5-1 | −7.13 | −7.13 | −7.13 | −7.13 | −1.31 | −1.50 | −2.01 | 2.34 | −1.02 | −1.50 | −1.49 | −7.13 |
| 7781-R5-2 | −7.71 | −5.45 | −1.96 | 1.05 | −1.75 | −3.27 | −3.53 | −1.42 | −2.53 | −2.75 | −2.78 | −22.71 |
| 7824-R5-1 | −2.36 | −12.29 | −1.52 | −1.54 | −2.01 | −3.22 | −4.60 | −1.27 | −24.95 | −3.64 | −4.64 | −1.19 |
| 7846-L5-2 | 1.10 | −2.66 | −2.66 | −2.66 | 5.00 | 2.15 | 1.24 | 4.64 | −2.66 | 2.08 | 1.99 | −1.18 |
| 7883-R5-1 | −4.16 | −2.58 | −1.80 | −1.08 | 3.79 | 1.59 | −2.34 | 3.80 | −1.95 | −1.40 | −1.82 | −1.00 |
| 78-R4-1 | −2.39 | −2.39 | −1.21 | 6.26 | 2.28 | 1.91 | −1.02 | 1.00 | 3.43 | 1.26 | −2.39 | −2.39 |
| 7949-R5-1 | −4.01 | −4.36 | −1.30 | 1.15 | −2.21 | −2.42 | −2.64 | 1.16 | −2.75 | −2.23 | −3.15 | 1.33 |
| 7971-L5-1 | −7.45 | −7.45 | −1.61 | −7.45 | 1.29 | −1.04 | −1.90 | 2.29 | −7.45 | 1.31 | −1.06 | −7.45 |
| 8016-L3-1 | −13.40 | −1.65 | 1.05 | 1.08 | 1.03 | 2.34 | −2.26 | 3.25 | −1.63 | −1.53 | −2.21 | −13.40 |
| 8062-R5-1 | −7.61 | −3.70 | −1.70 | 2.18 | 2.59 | 1.56 | −2.32 | 2.34 | −7.61 | 1.60 | −1.20 | −7.61 |
| 8077-R3-1 | −10.66 | −10.66 | −1.94 | 1.52 | 1.52 | 2.13 | −2.53 | 4.22 | −10.66 | −1.39 | −1.79 | −10.66 |
| 8089-L5-1 | −12.58 | −12.58 | −12.58 | 1.14 | 1.34 | −1.19 | −3.58 | 1.73 | −12.58 | −2.50 | −2.89 | −12.58 |
| 8239-R5-1 | −7.85 | −7.85 | −1.71 | 1.38 | 3.30 | 1.25 | −1.74 | 4.30 | −7.85 | −1.16 | −1.28 | −7.85 |
| 8250-R5-2 | −8.86 | −6.17 | −3.27 | −1.52 | 1.20 | −1.96 | −3.94 | 1.31 | −3.73 | −2.78 | −2.56 | −1.90 |
| 8281-L5-2 | −4.41 | −1.86 | −1.49 | 2.18 | 1.25 | −1.11 | −2.92 | 2.00 | −2.11 | −1.90 | −2.99 | −5.52 |
| 8298-R5-1 | −2.06 | −3.00 | −4.52 | −1.25 | 1.18 | −1.68 | −4.67 | 1.41 | −2.94 | −3.38 | −3.35 | −2.74 |
| 8329-L5-1 | −7.14 | −7.14 | −7.14 | −1.04 | 1.64 | −4.12 | −1.88 | −2.09 | −7.14 | −1.69 | −1.50 | −7.14 |
| 8336-R5-2 | −7.05 | −5.15 | −1.26 | 1.44 | 1.78 | −1.12 | −2.29 | 2.53 | −1.47 | −1.45 | −2.17 | −26.66 |
| 8394-L5-2 | −33.24 | −2.09 | −1.40 | −1.37 | 1.26 | 1.30 | −2.51 | 2.74 | −2.20 | −1.19 | −1.38 | −1.20 |
| 8564-L5-1 | −9.90 | −9.90 | −9.90 | −1.75 | 2.20 | −1.21 | −2.57 | 3.01 | −9.90 | −2.15 | −2.29 | −3.34 |
| 8564-R5-2 | 3.57 | −3.01 | 2.65 | 4.26 | −1.18 | −1.95 | −1.65 | −6.82 | −1.16 | −1.87 | −3.25 | −6.82 |
| 8898-R5-1 | −15.47 | −9.30 | −2.03 | −1.44 | 1.04 | −1.40 | −4.53 | 1.61 | −2.95 | −1.90 | −2.58 | −1.63 |
| 9021-L5-2 | −9.46 | −4.89 | −1.02 | 1.42 | 1.38 | 1.13 | −1.84 | 4.21 | −1.28 | −1.21 | −2.15 | −9.46 |
| 9068-R5-2 | −10.19 | −2.29 | −1.93 | 2.59 | 1.47 | −1.63 | −3.56 | 1.03 | −4.24 | −2.77 | −4.29 | −2.77 |
| 9087-L5-2 | −5.65 | −2.03 | −2.17 | 1.21 | −1.62 | −4.32 | −4.61 | −1.82 | −3.78 | −3.28 | −6.39 | 1.58 |
| 9134-R5-1 | −2.19 | 1.85 | −1.06 | 5.55 | 1.62 | 1.08 | 1.58 | −2.19 | −2.19 | 1.28 | −2.19 | −2.19 |
| 9217-L3-2 | −25.69 | −2.49 | −2.14 | −1.16 | −1.07 | 1.71 | −3.81 | 1.45 | −2.41 | −2.14 | −2.41 | −11.60 |
| 9245-R5-1 | −7.70 | −7.70 | −7.70 | −7.70 | 1.21 | −1.21 | −1.48 | −7.70 | 1.20 | −1.58 | −1.57 | −7.70 |
| 9287-L5-2 | −8.66 | −10.47 | −2.11 | 1.95 | 1.22 | 1.28 | −5.10 | 2.39 | −5.82 | −4.19 | −6.03 | −2.02 |
| 9369-L5-1 | −2.53 | 2.54 | 3.26 | 5.80 | −1.36 | 1.32 | −1.20 | −2.53 | 3.39 | −2.53 | −2.53 | −2.53 |
| 9384-R5-2 | −15.00 | −15.00 | −3.18 | −1.02 | −1.40 | −1.71 | −4.41 | 1.20 | −4.03 | −2.13 | −2.58 | −15.00 |
| 9387-R2-2 | −2.27 | −11.24 | 1.24 | −1.66 | −1.77 | −2.13 | −2.67 | 1.46 | −18.94 | −3.05 | −3.88 | −1.22 |
| 9564-R5-2 | −21.32 | −1.78 | −1.27 | 1.30 | −1.36 | −1.75 | −2.96 | 1.23 | −1.50 | −1.51 | −2.02 | −8.68 |
| 9605-R5-1 | −2.11 | −2.11 | 2.05 | 9.59 | 3.34 | 1.71 | 1.35 | 1.73 | −2.11 | 2.19 | 1.04 | −2.11 |
| 9691-L5-1 | −13.91 | −7.43 | −3.19 | −1.18 | 1.46 | −1.16 | −1.81 | 3.62 | −1.45 | −1.71 | −1.56 | −13.91 |
| 9770-R5-2 | −16.08 | −16.08 | −1.38 | −6.49 | −1.54 | −1.04 | −3.18 | 2.79 | −16.08 | −2.24 | −1.93 | −16.08 |
| 9774-R2-2 | −20.32 | −5.37 | −3.62 | −1.47 | −1.04 | −2.24 | −5.14 | 1.19 | −4.78 | −2.77 | −3.92 | −3.06 |
| 9812-L3-1 | −8.36 | −8.36 | 1.41 | −3.81 | −1.10 | −1.30 | −1.61 | 2.18 | −8.36 | −1.63 | −1.54 | −8.36 |
| 9866-L5-1 | −11.22 | −11.22 | −11.22 | −11.22 | −1.94 | −4.41 | −3.65 | 1.13 | −11.22 | −2.98 | −2.07 | −11.22 |
| 999997-R4-1 | −40.37 | −3.22 | −2.37 | 1.31 | −1.44 | 1.32 | −5.01 | 3.93 | −3.66 | −3.76 | −5.46 | −40.37 |
| let-7b | −4.92 | 1.02 | 2.03 | 1.30 | −4.60 | −2.75 | −2.04 | −2.69 | −1.28 | −1.09 | −2.68 | 1.40 |
| let-7c | −6.31 | −1.05 | 1.94 | 1.37 | −4.31 | −2.44 | −1.65 | −3.04 | −1.21 | −1.03 | −2.43 | 1.67 |
| let-7e | −22.08 | 1.03 | 2.47 | 1.47 | −4.26 | −2.47 | −1.58 | −2.23 | −1.12 | −1.04 | −2.53 | 2.01 |
| miR-100 | −15.70 | −1.06 | 2.47 | 1.30 | −1.44 | −2.47 | −2.17 | −1.90 | −1.30 | −1.64 | −1.79 | −15.70 |
| miR-101 | −12.44 | −1.03 | 1.43 | 1.63 | −3.70 | −2.97 | −2.13 | −12.44 | −1.45 | −1.11 | −1.92 | 1.97 |
| miR-1182 | −12.48 | −2.69 | 1.05 | 1.43 | 2.25 | −1.41 | −1.78 | −1.07 | −12.48 | −1.46 | −2.26 | 2.67 |
| miR-1207-5p | −7.81 | −1.85 | −1.68 | 1.60 | 1.80 | −1.18 | −2.41 | 2.42 | −1.87 | −1.78 | −2.38 | −2.36 |
| miR-1224-5p | −8.27 | −4.01 | 1.20 | 1.73 | 3.06 | −1.10 | −2.00 | 2.05 | −8.27 | −1.44 | −1.68 | −8.27 |
| miR-1225-5p | −32.61 | −3.21 | −16.64 | 1.04 | 1.24 | −1.74 | −5.01 | 1.53 | −3.91 | −5.58 | −5.48 | −32.61 |
| miR-1228* | −9.13 | −2.28 | −2.02 | −1.49 | 1.07 | 1.35 | −3.26 | 2.11 | −3.56 | −1.07 | −1.87 | −3.42 |
| miR-1234 | −2.04 | 3.94 | 4.09 | 6.04 | 1.42 | 1.35 | −2.04 | −2.04 | −2.04 | −2.04 | −2.04 | −2.04 |
| miR-125a-5p | −12.05 | −1.57 | 2.48 | −1.11 | −2.90 | −3.80 | −2.32 | −36.39 | −1.43 | −2.16 | −3.93 | 1.84 |
| miR-126 | −41.23 | −1.60 | −1.58 | 1.20 | −9.24 | −16.81 | −5.80 | −17.32 | −3.33 | −5.96 | −5.54 | −2.23 |
| miR-1268 | −10.67 | −10.67 | −10.67 | 1.26 | 1.67 | −1.01 | −1.65 | 4.86 | −1.28 | 1.79 | −1.47 | −10.67 |
| miR-130b | −2.21 | −2.21 | 5.25 | 5.24 | −1.32 | −2.21 | 1.17 | −2.21 | −2.21 | 1.98 | 1.45 | −2.21 |
| miR-140-3p | −4.44 | −4.44 | 1.97 | 2.44 | −1.38 | −2.55 | −1.53 | −4.44 | −1.28 | −1.52 | −2.25 | −4.44 |
| miR-145 | −31.48 | −1.89 | 1.24 | −1.28 | −2.10 | −1.49 | −2.04 | −13.08 | 1.01 | −3.26 | −2.80 | 1.20 |
| miR-149* | −61.43 | −1.79 | −1.40 | 1.02 | 1.46 | 1.72 | −2.47 | 3.20 | −2.22 | 1.19 | −1.22 | −2.53 |
| miR-150 | −3.14 | −3.14 | 3.09 | 4.65 | 1.17 | −1.40 | −1.27 | −3.14 | −3.14 | 2.18 | −3.14 | −3.14 |
| miR-181b | −2.73 | −2.73 | 4.73 | −1.14 | 1.39 | −1.40 | −1.08 | −2.73 | −1.49 | 1.49 | −1.51 | −2.73 |
| miR-181d | −2.47 | −2.47 | 1.60 | 3.76 | 1.17 | 1.29 | −2.47 | −2.47 | −2.47 | 1.49 | 1.28 | −2.47 |
| miR-185* | −10.19 | −10.19 | 1.73 | −3.97 | −1.15 | −2.49 | −2.41 | −10.19 | −10.19 | −1.56 | −2.19 | −10.19 |
| miR-214 | −4.43 | −4.43 | 2.00 | 2.45 | −1.27 | 1.26 | −1.06 | −4.43 | 1.76 | −1.08 | −2.47 | −4.43 |
| miR-23a* | −3.92 | −3.92 | −3.92 | −3.92 | 2.27 | 1.12 | 1.28 | −3.92 | −3.92 | −1.18 | −3.92 | −3.92 |
| miR-30a | −19.76 | −1.04 | −1.44 | 1.58 | −3.89 | −3.05 | −4.56 | −7.27 | −1.86 | −1.24 | −2.08 | 5.69 |
| miR-30d | −1.08 | −16.33 | 1.01 | −5.75 | −3.77 | −3.17 | −4.86 | −16.33 | −7.71 | −1.17 | −2.19 | 12.09 |
| miR-320a | −3.29 | −2.05 | 1.23 | 1.49 | 5.76 | 2.18 | −1.27 | −9.70 | 1.23 | 1.59 | −1.65 | −3.76 |
| miR-320b | −10.09 | −2.35 | 1.00 | 1.90 | 5.22 | 2.10 | −1.35 | 4.46 | −1.05 | 1.28 | −1.58 | −10.09 |
| miR-335 | −3.24 | −3.24 | 1.22 | 3.13 | −3.24 | −3.24 | −1.26 | −3.24 | −3.24 | 5.52 | 1.37 | −3.24 |
| miR-34a | −2.08 | −2.08 | 5.16 | −2.08 | −1.23 | −2.08 | 1.19 | −2.08 | −2.08 | −2.08 | −1.15 | 1.18 |
| miR-34b* | −3.29 | −3.29 | 5.13 | −3.29 | −3.29 | −3.29 | −1.55 | −3.29 | −3.29 | −3.29 | −1.06 | −3.29 |
| miR-34c-5p | −2.54 | −2.54 | 5.54 | −2.54 | −2.54 | −2.54 | −2.54 | −2.54 | −2.54 | −2.54 | −2.54 | −2.54 |
| miR-371-5p | −3.87 | −3.87 | −1.81 | −1.51 | 1.98 | 1.65 | −1.03 | −1.06 | −3.87 | 1.10 | −1.83 | −3.87 |
| miR-373* | −34.48 | −13.72 | −1.65 | −8.74 | 1.28 | 2.21 | −3.58 | 5.31 | −16.32 | −2.81 | −4.50 | −34.48 |
| miR-451 | −14.34 | −2.32 | −4.25 | −2.09 | −10.15 | −7.99 | −3.72 | −9.47 | −9.88 | −7.90 | −2.86 | −3.23 |
| miR-486-3p | −10.16 | −10.16 | −2.27 | 1.10 | −1.59 | −1.36 | −3.64 | 1.72 | −10.16 | −2.14 | −1.92 | −10.16 |
| miR-491-3p | −2.34 | −2.34 | −2.34 | 2.06 | 1.33 | −2.34 | 2.23 | −2.34 | −2.34 | 1.67 | −2.34 | −2.34 |
| miR-498 | −28.12 | −3.04 | −1.96 | 1.11 | −1.41 | −2.01 | −3.75 | 1.36 | −3.41 | −2.64 | −4.35 | −28.12 |
| miR-557 | −10.00 | −1.36 | −1.92 | 1.93 | 1.16 | −1.55 | −2.17 | 1.60 | −1.32 | −2.10 | −2.21 | −1.67 |
| miR-638 | −5.13 | −5.73 | −2.92 | −1.37 | −1.87 | −2.89 | −5.04 | −1.34 | −4.22 | −3.54 | −4.11 | −1.97 |
| miR-663 | −15.30 | −15.30 | −2.65 | −1.03 | −1.31 | −1.69 | −3.07 | 1.69 | −1.47 | −1.68 | −1.53 | −15.30 |
| miR-671-5p | −9.36 | −9.36 | 1.12 | 2.50 | 1.56 | 1.06 | −2.25 | 2.06 | −1.39 | −1.18 | −2.06 | −9.36 |
| miR-744 | −14.84 | −14.84 | −3.03 | 1.02 | −1.26 | −1.33 | −3.71 | 2.36 | −1.77 | −2.34 | −2.27 | −14.84 |
| miR-885-3p | −26.07 | −26.07 | −2.17 | −1.16 | −1.96 | −2.54 | −4.68 | −1.16 | −3.53 | −3.27 | −3.46 | −10.53 |
| miR-92a-2* | −8.53 | −2.11 | 1.23 | 1.61 | 1.34 | 1.10 | −2.40 | 2.65 | −1.15 | −1.39 | −1.82 | −8.53 |
| miR-92b* | −11.88 | −11.88 | −1.16 | 1.21 | 1.35 | 1.19 | −2.46 | 3.28 | −1.42 | −1.41 | −1.46 | −11.88 |
| miR-98 | −45.32 | 1.35 | 2.78 | 1.82 | −4.33 | −2.12 | −1.37 | −9.42 | 1.07 | 1.08 | −2.69 | 1.84 |
| miR-99a | −10.35 | 1.22 | 3.06 | 1.55 | −1.32 | −4.39 | −1.67 | −10.35 | −1.21 | −1.78 | −2.15 | −10.35 |

TABLE 25
Pre-microRNA sequences and chromosomal locations of target RNAs in Table 23 and 24

| Gene | Chrom loc'n | Pre-microRNA sequence | SEQ ID NO |
|---|---|---|---|
| 10010_B-L4-1 | 7q32.1 | GGGCAGCGCCCCTCCTTCCGGAGGGCAGCATCCCGGCGGGGGCGGGGGCTCGGCTTTGATGCCAGGGCACCTTTTGTCCCTGGCCAGCCAGGTGCGTGGAG | 1708 |
| | | GGAGTGCAGCCC | |
| 10010_D-L4-1 | 7q32.1 | CAGGTGAGAGGCTGAGCCCCGGGCGGGGGAGGGCGCCAGGCCTGGGGCATTAACCGTCCCGGGGACCCTTTTGGCCTG | 1709 |
| 10010-R2-2 | 7q32.1, 17q23.2 | CCGGGCGCCCCCGAGAGCCGGCCCTCCCTTCCTCCGTGACAGGTGGGCCTGGAGTTGGGGAAAGTTTGGAGCCGGCGAGGGGC | 1710 |
| | | GCCGGG | |
| 10030-R5-1 | 10q24.1 | GGATGCAACCGTGGAAGCCGGTGCCGTTGAGGATCTGCCAC | 1711 |
| | | AGGCGGAAGGCAGCTGAGTTGACATCCACGGGCATCC | |
| 10145-L5-2 | 5p15.33 | GGTCCAGATAACAGAAGAGAGAGCAAAGGAAAAAGAATTTTTTGAAGATCAAAAGTGGCTGTTCATTTTGTTATCTGACC | 1712 |
| 10231-R3-1 | 9p11.2 | GGCGGCTGCGGAGGCTGGCGCGGGCTGCTGCACCTTTAACGCTTTCTGGCGCTGACAGGCGGCGGCCCAGCTAAAGTTCACAGC | 1713 |
| | | GCC | |
| 10260-L5-2 | 22q13.1 | GTGGGAGACATCGGGTGGGGGCCCTGGCGAACAATAGGTGGGCCCAGCTGGGGCCCCCTCCTGCCTGCCTCACCGC | 1714 |
| 10333-L5-1 | 11q12.2 | CGGGGCAGGGGAGGGGGTGGGCAGGGCACAAGCCTCCCACTGTGCCGTGTCCCCACCCTCCCCCGTTCCCCG | 1715 |
| 10342-R2-2 | 19q12 | CCCACGCACGGAGGGTCGCCAGGAAAGTGGACATTACCGCTTTAATTAACTTCGAGATGCTCCGGCGGCGGG | 1716 |
| 10345-R5-1 | 20p12.3 | ACCCTCAAGCTCTCAAGTGGTGACCACCGTCCTTCCGGCCAGGTAGGACTGGATGGGAGGGGTCGCTTTTGAGAGAAGGGT | 1717 |
| 10374-R3-2 | 16q12.1 | CAGGGGATTTGTTACCGCTGATGTGTGGCCCGTCCGAATGAAGGGGGCTTTTCATTAACAAAGTAGCGGGCGGTGTCATCTTCCC | 1718 |
| | | CTG | |
| 10435-R5-1 | 5q35.1 | GAGGCTGCTTAATGAGGTGCCCTTTTCAAAATGTCATCTTAATCTTTTATTAGTTTAAGAAAGACAACAGGGCACAATTAGCATGCAA | 1719 |
| | | CTC | |
| 10533-R5-2 | 20q12 | TAATTGCCTGAATCGCCGGGTTACATATCTGTTAGGAAATCTCTTGGCAATATAAAGAAGGGGCTCAGGACAGTTA | 1720 |
| 10543-R5-2 | 1p31.1 | GCCTTAACCTTTTTATCATTTATCTTCTTGTATTAATGTCACTGAATTATTAATTCATGAGCCAGGATGGGAAGGGTGAAGGC | 1721 |
| 10578-R5-1 | 1p22.3 | CCGCCAGCTTTGTAGCGGTTCCTGCTTACAAAAGGGCTCTTCTTGGAAACGGGGCTGGTGGGGACCGTAGAGGGGGTGG | 1722 |
| 10818-L5-1 | 8q24.3 | GGCGGCTGACAGCGGTCATTTGTCATCACTGAGCTGCCCAAACTCCTCAGACTGCACTGCGGATGGCTGCTTAGGGTGACTTATG | 1723 |
| | | GCCCTGTCGGGCTGCC | |
| 11370-L5-5 | 12q13.2 | GTCCAGTTCTCAGGGGACAATACTGATGGCAGCCAAACTGGGCAAGGATGCAGTGTGGGGGCGGAGGGGGCATGACCTCTATTC | 1724 |
| | | AAGTTCTGTGTCTTGGCCCCTGGCTGAGGTATTGAGTGTGAGGAAGGGAACACTGGGC | |
| 11605-L5-4 | 1p31.3 | GGCCCTGTGCATAATAAATCTTTATGGAATTGAGGGGAAGGGAATTAAAGAAGGGAAGAGAAGAGCAAACCCACTACAGAGTTTAT | 1725 |
| | | GACCATCTATTCTTAATATTATATTAGAACTGGGCC | |
| 12184-L4-1 | 3p14.1 | TTGTACACAATATTCGTCTGTGGTTGAAAGGGGGCACGCTGAGGTCAAGTGATGTAGTGTTTTCCATTTTTCCATATGAGTCTCACA | 1726 |
| | | GTGTGCGA | |
| 12184-L5-3 | 3p14.1 | TTGTACACAATATTCGTCTGTGGTTGAAAGGGGGCACGCTGAGGTCAAGTGATGTAGTGTTTTCCATTTTTCCATATGAGTCTCACA | 1727 |
| | | GTGTGCGA | |
| 12224-L4-1 | 4q27 | TTGCTACTCCATGGGGTGGATTTTCATGGCGACGCCTTGTTATCTTGGTTATTGTTGCCATAGGACTTTCCAAAGCACCACATGGTT | 1728 |
| | | TGGTAA | |
| 12361-R5-1 | 6q23.3 | GGTCCACTGTCAGAGAGAGATGTGCCACTGTGCACTCTCTGAGCAGATGGGCGGCAATATGGCACATTTACATGGACC | 1729 |
| 12691-R5-1 | 1q22 | CCCACGCGTCGCGCGCTCCCGACCGGAGCGGGACGGGGCCTGTCGGGGGCGCGCCAGGGGCGGGG | 1730 |
| 12692-L5-1 | 1q22 | GCGCGGTGGCCGGGTGCTGGCTGCGGGGCCGGGTCCTCATTCTGCTCAGTCCTTGCTGCCCTTGTCTTCTCCTCCCCGCCAAGC | 1731 |
| | | CGCCGTGT | |
| 12693-L5-1 | 1q22 | GGGGAGGGGACCGGGAGGGCCGGGCGGCCGCGACCCCCAACCTCTCGGAGGAGGGGCTGCCGCTCGCCGCTCCGCTCTTTGT | 1732 |
| | | TGTTTGGGGCTCCGCGCCTCCCCCTCTCTCCCTCCTC | |
| 12694-R5-1 | 1q22 | GGGGACGTGGCCCCTCCCCCCCGGAGCGGGACTCCAAGAACTCCGGGGGGCGCTGGGGGCTGACTTTCC | 1733 |
| 12696-R5-2 | 1q22 | GATCAGGTTCCCCTCCCCCGCATACACCTGGGCGCAGGTGAAAGCTCAGGGAGCGGGTGGGGGAGCCCGGGTT | 1734 |
| 12697-R5-1 | 1q22 | CGGGAGCCTCCTTTCTGTCCTCTCTACTCCGTGCGGGCCTGGGCCGGCAGAGGTAGGAGGGGGCGCACACCGGGCAGGAGGC | 1735 |
| | | TGCC | |
| 12699-L5-1 | 1q22 | CTGGGACGGGCGGGGCGCCGAGGCCCAGGGCGCCTGAGGGGCGCAGAGGTGTCAGCGTGCAACCGCCGCCCCCCAGCGTTCC | 1736 |
| | | CGCCACCACCGCCACCACCCTCAAAGCCCGG | |
| 12701-L5-1 | 1q22 | CCGGGGCTGGGGGTGGAGGATGGCGAGGATTTGACAAGTTCAGGGCCCCCTGGGATCCTTTCCCTACTCCCTGGTCTTGTTGGA | 1737 |
| | | CACCCTGTTTACCTGCCCTAATTGCCCCGG | |
| 12703-L5-3 | 7q32.1 | GGGCAGCGCCCCTCCTTCCGGAGGGCAGCATCCCGGCGGGGGCGGGGGCTCGGCTTTGATGCCAGGGCACCTTTTGTCCCTGG | 1738 |
| | | AGACGCTCTGCCAGCCAGGTGCGTGGAGGGAGTGCAGCCC | |
| 12704-L5-2 | 7q32.1 | CAGGTGAGAGGCTGAGCCCCGGGCGGGGGAGGGCGCCAGGCCTGGGGCATTAACCGTCCCGGGGACCCTTTTGGCCTG | 1739 |
| 12713-R5-1 | 8q24.3 | CGGAGGTCGCTCGCTCGCTCGCTCGGCTCGCTGACTCGCCGGAGCGCTCTGTGGCGGTCGGCGGCAGGTCGGTCGCGAGAGCG | 1740 |
| | | GGCTCTG | |
| 12722-L5-1 | 13q31.3 | GCGGGCGGGCGGGGAGGTCGGAAGTACTTTGTTTTTTATGCTAATGAGGGAGTGGGGCTTGTCCGTATTTACGTTGAGGCGGGAG | 1741 |
| | | CCGCCGCCCTTCATTCACCCACATGGTCCTTCGAGGTGCCGCCGCCGCCGCCCGACCTGC | |
| 12723-R5-2 | 17q25.3 | CCCTTTGCACCTCCCGGGATTGGGCGGTCAGGGCCAGGGCCCCTTGAGAGTCTGGGAATCCCTTCTCTGGGCCTCGCTGGGGTC | 1742 |
| | | CTGGCCAGGAAGGGGCTGGGGGTGACAAGGGG | |
| 12725-R5-1 | 17q25.3 | TCTTCCTCCACCCTGCCCCACCCCTAGGTCTCTTTATTGATTCAAAGGTTAAGGAAGCTCCTGGGGGCTTGAGGGGGTGGCACAGT | 1743 |
| | | TTTGGTGGGGCCCAGTGAGGA | |
| 12731-L5-1 | 17q25.3 | GCGCGCCGGGGCGCTGGCGGCCGGCGCGGCTGCAGACGCTGCTAGCTCCCGCCGGCGCCCAGCTGCCGCCCCGGCCGAAGC | 1744 |
| | | GCCCCCGCCGC | |
| 12900-R5-3 | 17p13.3 | GTTCGCGTGACCCTCAGCGCCCTCCCCACCCGGCAGGCCCTTTCCCGCCGAATGGGTGCGGCTGGATTATTGAGGGAGTGGAGG | 1745 |
| | | GTCGCTTAGGGCACGGGCAC | |
| 12904-R5-2 | 17q11.2 | GGCGTCCTGCCCATACTGTTGTCCCTGTTTTGGGGGCATGTGGGAGCCAACACAGGGGAGTCAGGTGTGTGGTAGGCAGTCAGG | 1746 |
| | | TGTGTTTTGGGGTCAGGGAGGCAGGTTTGGGCCTGGGAGGCC | |
| 12910-R5-2 | 22q12.3 | GGCCCATGGTCACTCCCCAGCAAATGACAGCTCAGTGGCTATAATTAATGTCAAATTGGATTTTGTCATTTCAGTGGGGAAATGGAG | 1747 |
| | | CTGTGGGCT | |
| 12925-L5-3 | 1q23.3 | GGCAGGTGGAACCAGCATATTCTTTATTCACCAAAGGGAAAAGGAGGAGGTGTTCAGGATGTTACCTCAATTTCCAGGTCTCCCTC | 1748 |
| | | TCATGTGTTGGTTTCTCCTGCT | |
| 12932-L5-3 | 18q21.31 | CAAGTGAAGAGTGAAGGTATTAGTAGGTGGGAAATGGGGGTGGAAGGGAGTCTTGAGCTTTATTTGATCCAATTGTCACTCTATCT | 1749 |
| | | ACTGCTTAACTTTGCTTCCTTTTCTTG | |
| 12939-L5-2 | 13q22.3 | AAGTCATATAGCTATTAAGTTGTAGAGGTGGGTTTTGAATCAGAGCTGAATCTAAAGTTCACCTTTTCTAAAACACTCTAAAAGCTAA | 1750 |
| | | GTGATTT | |
| 12947-R5-3 | 6p21.1 | GCCTTGTCTGAAGGGAGAGGCCCTGGCATGCGGATGGGAGATTTAGAGGCTGTGGAGAAGGGAACTTGGGGCTTTCCTTCCTTCG | 1751 |
| | | TGGCCTCACTCCCCTGGGGCCTCTCTCTATGGAGGGGGC | |
| 12975-L5-1 | 3p26.2 | AGGCGGGAGGGATGTTGTAGACTCCTCACTCCATGAGCATACAGTATTTTCTCGCCT | 1752 |
| 12981-L5-1 | 3p14.1 | GGGTGGGGGCAACCAGACCAAGGTGACATCATTCCCAAGGGGACACTGAAGGAAAACTATGGGAGGGTCTGGGTTCTGTCTGTCT | 1753 |
| | | TCACCC | |
| 12981-R5-1 | 3p14.1 | GGGTGGGGGCAACCAGACCAAGGTGACATCATTCCCAAGGGGACACTGAAGGAAAACTATGGGAGGGTCTGGGTTCTGTCTGTCT | 1754 |
| | | TCACCC | |
| 12998-R5-1 | 9q33.3 | TAGGCCGAAGTACCTCTCCAAGGTTATTTGAGAGGCGCTGATAGCCTTGGCGGTGGCACTGGGGCCTG | 1755 |
| 13004-R5-1 | 12q13.2 | CCTTGACTTCCCTTTCTTCTCACTTCGGACTGCTCACTTGCCTTGTTCAGCCCTGAATCATCAGGTGAAGGGAGCGAGAATTGCGG | 1756 |
| | | GGGTTGGAGTTAGGTAGAGGGATTTAAGG | |
| 13047-R5-2 | 10q26.3 | ACCTCAGTGTTGATAGCAGATCTCATTATAGTCGGTGCATTTGGCTACCGACCTGCAGCCAGCAGTGCCCGGGGCTAGTGCATGG | 1757 |
| | | GGTCTGCTGTGCCACTGTGGT | |
| 13050-R5-4 | 19p13.12 | AGGCCGTCCGCAGACCCAGGTCAGGGGCGAAGGCGCGCTCGCCCATCCCTGGTCGTCACTGCTTGGCTTGCGGGGGGTGGGAG | 1758 |
| | | ATAGGGGTGCGT | |
| 13052-L5-1 | 19q13.33 | GGTTGGCGGGTGGGGGAGATGCTTAGGTCCGGGGAATCTCTGAGATTCTCGGCTTCCCCTCTCCCCTCACCCTCCTCCTCAGGCC | 1759 |
| | | CCAGGCAGCCCCGGGGCATGCTGGGAACCCAGGCCTGGGCTCCGGGCCAGG | |
| 13066-R5-2 | 5q33.2 | CAGCCACCAGAGCAGATGAGCTGTCACCTTTAAATCACAATTCTGAAGCTCTGGAAGAGAGAATAGAATTGGTTCAACTAGATTTGG | 1760 |
| | | GGGCTACCTCCATCTGCTCAAGTTTGGCTG | |
| 13072-L5-2 | 7q22.1 | GGAGGATACTGGTGGGGGCTATACGTTTGGTGAAATCCATCAGTGATATTCAAGCCAAGCAAATAATCACCCACTAATTTGTGTTTT | 1761 |
| | | CC | |
| 13075-L5-1 | 2p21 | AGAGGGCTGGGCTGGACTTCAGCTTTCACCTAGGAAATGAGTCTTGCTGCCCTTT | 1762 |
| 13089-L5-2 | 10q24.2 | CACTAGCCCAGGGCTTGGAGTGGGGCAAGGTTGTTGGTGATATGGCTTCCTCTCCCTTCCTGCCCTGGCTAGGCCCTGGAGCGAC | 1763 |
| | | TG | |
| 13091-L5-2 | 9q34.11 | TGCAGCCTGGGCCTGCTGAACACTTGAGGGTCGGGGGTTCTCAGGAAATCCCTGAGAGCTCAAAGGATGGCCTGAGGGGCCTGG | 1764 |
| | | TGGCA | |
| 13093-L5-2 | 11q13.1 | CTGACTTCTGCGCGGGGCGCGGTGGGGTTCTGCGGGGTCGGAAAGACTCCCCAGATCCCCGCGCGGCCCCAGACCCAG | 1765 |
| 13095-R5-1 | 1p36.11 | GGGCAGGGCAGCTTCACCTGGCTCTGCAGCTCCTGAGCCTGGGTGGGCTAACCTGGGCCAGGAGTAGGGAGGTGGGTCCTGCC | 1766 |
| | | ACTGCCC | |
| 13097-L5-2 | 11q23.3 | GTGGACAACCCTAGGGTGGGGCTGGAGGTGGGGCTGAGGCTGAGTCTTCCTCCCCTTCCTCCCTGCCCAGGGGTCCAC | 1767 |
| 13110-R5-1 | 16p13.3 | AGTTGGGGGTCCAGGAGGCTCCAGGGTGAGCCCACTCCTCCCCCTAGATACAAGGGAGGGCCCTGGGACCCTGTCTGCTGTTCC | 1768 |
| | | TCCTGGACTCCTGCT | |
| 13115-L5-3 | 1q21.3 | AGGGAAAGGCAAGGGTAGCCATTGTTTGGGTTGGGGTGGTCGGCCCTGGAGGGGGTTTGTTTGCTTATTCCCCTCTGTGCTTCAC | 1769 |
| | | CCCTACCCAGCTTCCCGCCAGAAAGCCCTG | |
| 13115-L5-3 | 1q21.3 | GGCAAGGGTAGCCATTGTTTGGGTTGGGGTGGTCGGCCCTGGAGGGGGTTTGTTTGCTTATTCCCCTCTGTGCTTCACCCCTACC | 1770 |
| | | CAGCTTCCCGCC | |
| 13119-R5-2 | 17q21.32 | TCTCCGTGCACGCTGCTGACCGGCTCGGCGACTGCCTCCCTGCTGTGAGCAGGAGAACAGGAAGTCTGCCCGACAGGGAGGTGG | 1771 |
| | | CCGGGCGGGAGCGGCAGAGTCGGCGTTGAGA | |
| 13124-L5-1 | 1q22 | TGAGGGGTAAGTTTAGGCTTTCGCGGAGGGGAGGAGACATGGAGCCTGGGAACTCCTTGTTCTCCCCTCTGCTGCCTCTCCCCAC | 1772 |
| | | CCCTTA | |
| 13129-L5-3 | 20q13.33 | TGGCGCTGCTCTGCTGTTCCTCTGTCTCCCAGACTCTGGGTGGATGGAGCAGGTCGGGGGCCAGGGGACAGGAAGGCTAGGGCC | 1773 |
| 13129-L5-3 | 20q13.33 | CCAGACTCTGGGTGGATGGAGCAGGTCGGGGGCCAGGGGACAGGAAGGCTAGGGCCCCAGAGACCTGTCCTGGGCCCCATGTC | 1774 |
| | | CAGCTCTGCCCTTAGTGCTTGG | |
| 13130-L5-1 | 19p13.3 | CCAAGCAGCTTATCGAGGAAAAGATCGAGGTGGGTTGGGGCGGGCTCTGGGGATTTGGTCTCACAGCCCGGATCCCAGCCCACT | 1775 |
| | | TACCTTGGTTACTCTCCTTCCTTCTAGGG | |
| 13130-L5-1 | 19p13.3 | GAGGAAAAGATCGAGGTGGGTTGGGGCGGGCTCTGGGGATTTGGTCTCACAGCCCGGATCCCAGCCCACTTACCTTGGTTACTCT | 1776 |
| | | CCTT | |
| 13135-R5-1 | 1q42.12 | CATGAGTCTGCACCTCCAGGCAGGCTCTGTGCAGTACTCACCCCCTCCGTCTGCTCCCTCCAAGGTGTGGGGGTGGGCAGTGCTC | 1777 |
| | | AGGGCCTCCTCGGAGCCAAAGGACAGCATG | |
| 13136-L5-3 | 5p15.33 | GAGGAGGGAGCCCCCCATAGGGTGGCCCTGACCAGGGCTGGCAGGGGCAAGTGTGGACGCCCGGCCCCTTGCCCAGGCTGGG | 1778 |
| | | ACCACTCTGAGGGACAACTCATCCTT | |
| 13137-L5-1 | 5p15.2 | GGCATGGGGAGGTGGGGTTGCGGGGGTTAGAGCTGTGGGTGATCAGAAGGGAAGGGCTTCATTTCTACGCTCTGCCTCCGCTAC | 1779 |
| | | CTCTTCCCCACCACCCCTAATCCC | |
| 13138-R5-1 | 5q22.3 | ATCCGTCGCAGCAGTCGCTGCAGCCGCTGCAGTCCGAGCCGACTAAGGGCGGGAGGCAGCTCGGGTGGCGGGGCGTGGCGAAC | 1780 |
| | | AGCGCGGCCGGAT | |
| 13163-R5-1 | 19q13.32 | GCTGGGATCTCCGGGGTCTTGGTTCAGGGCCGGGGCCTCTGGGTTCCAAGCACCAGTGAGGAGAGTGCTGGGAGGGGAAGGGG | 1781 |
| | | TGGGAGGGCTTTGGTCTTGTGGGAGGGAGAGAAGGAGGGGAGGT | |
| 13164-L5-1 | 10q23.33 | GGTATCCTGAGAGTTTATTAGATGTTTGTTTTCATTCCTTTTGCAATGGCCTATGGTATATTATGTATCAACATTTAATGTGATGAAAA | 1782 |
| | | CGTCTCACTTATATTCTTCAGGATACT | |
| 13166-L5-1 | 20p11.1 | GCCTCGCGGGGTGGGTCGGGGGGTCCTCTGACGCGGCAGGCACCCCTCGCTCTCGCCTCCTGTGGT | 1783 |
| 13181-L5-1 | 1p21.3 | TCCTGAAAGAGGTTGGGGCAGGCAGTGACTGTTCAGACGTCCAATCTCTTTGGGACGCCTCTTCAGCGCTGTCTTCCCTGCCTCTG | 1784 |
| | | CCTTTAGGA | |
| 13184-L5-1 | 9q33.3 | CATTAGGTGGTGGGTTTTTGGTTTATTTTTTGCTTTTTCAATATGGAAAATAGCTTGTGGACTATCACTAACACCTCTGTG | 1785 |
| 13186-R5-2 | 3q25.2 | GCATGCACAGTCATTTTTGTTTAAGAGTAATATTTTTAATGTAATAGATTGTAAGACGTGGTGAGGGAGGGATCTGACAGAGATGAA | 1786 |
| | | TGTGCCAAGC | |
| 13195-L5-3 | 3p21.1 | AAAAAAAAAAAAGATACTAATACAAATGGTCATGGAGGGGGAATATAGAGAAGATCAATTTTGTACAGAAAAACCATTGGTTAGTATT | 1787 |
| | | TTTTTTTCTTTT | |
| 13199-R5-1 | 10q26.13 | AGGTGCTGGGAGAAGCTGCCAGTGTTTCTCAACATGTCTGCCTCCCTGGGAGGTGAAGCATGGGCAGAATCCCCCAGCTTCCCA | 1788 |
| 13202-L5-1 | 10p15.3 | TGGTGGGGCTTCTCAGAGGAGGTGGCAGGAGACCCGAGCCTGCCAAGGTTGCACCTAAGGTCACGGGCAGCATTAGGAGGGCTC | 1789 |
| | | TCTCCCAGTCTCCCCACCCCCCCATCCCCCCTCCC | |
| 13202-R5-2 | 10p15.3 | TGGTGGGGCTTCTCAGAGGAGGTGGCAGGAGACCCGAGCCTGCCAAGGTTGCACCTAAGGTCACGGGCAGCATTAGGAGGGCTC | 1790 |
| | | TCTCCCAGTCTCCCCACCCCCCCATCCCCCCTCCC | |
| 13209-L5-2 | 10q22.1 | GGGAGCCGCCGGCGGGCAGGCCGCCGGGGCAGCAGGCGAGTTACCTCAACTCCCGGCCGCTCCGGAGGTTGCCGGGCACCGA | 1791 |
| | | GGAGCCGCCGTGCCCTTCAGGCGCCTGCGGCGGCGACCA | |
| 13209-R5-3 | 10q22.1 | GGGAGCCGCCGGCGGGCAGGCCGCCGGGGCAGCAGGCGAGTTACCTCAACTCCCGGCCGCTCCGGAGGTTGCCGGGCACCGA | 1792 |
| | | GGAGCCGCCGTGCCCTTCAGGCGCCTGCGGCGGCGACCA | |
| 13211-L5-1 | 10q23.1 | GCGCCTCCGGTCGGTCAGAGAGCGGCGGGGCGCGTCTGCAGCCCTCCAAGCCGCCTCCTGCGCGCCGGGTCCCCGCGCCCGC | 1793 |
| | | TGCTGCTGCTGCTGCCCGCCGCCTGCGTGC | |
| 13220-L5-3 | 1p13.3 | CCAGACCCAAACTAGGTTGAGTGAGGAAGGGGCAGTGGCAGCTACAGGAATAGCCTGTGATGCCTCTGTCCCTCTGAAGATGTCC | 1794 |
| | | CAATGTCCCGTGGCCTG | |
| 13229-L5-1 | 11p15.5 | TGCTGGCCCAAGGGGTAAAGGGGCAGGGACGGGTGGCCCCAGGAAGAAGGGCCTGGTGGAGCCGCTCTTCTCCCTGCCCACAG | 1795 |
| | | AGACTGGCGGAGCTGC | |
| 13230-L5-4 | 11p13 | AGCTTTGTGTTCGTAATGGCTCAGTTCAGGTGGTTGGAGCTGGAGGCACTGGAGCTAAGACTGTGGGCTCAGGGCCTCAAGTCCC | 1796 |
| | | TAGAATCACACCACACTTCCAAATCATTAAGCTC | |
| 13231-L5-2 | 11p13 | AGGAACAGGACGATGATGCTGGCGTCGGTGCTGGGGAGCGGCCCCCGGGTGGGCCTCTGCTCTGGCCCCTCCTGGGGCCCGCA | 1797 |
| | | CTCTCGCTCTGGGCCCGCTCCTCTTCC | |
| 13237-L5-4 | 1q21.3 | AGGGAAAGGCAAGGGTAGCCATTGTTTGGGTTGGGGTGGTCGGCCCTGGAGGGGGTTTGTTTGCTTATTCCCCTCTGTGCTTCAC | 1798 |
| | | CCCTACCCAGCTTCCCGCCAGAAAGCCCTG | |
| 13237-L5-4 | 1q21.3 | GGCAAGGGTAGCCATTGTTTGGGTTGGGGTGGTCGGCCCTGGAGGGGGTTTGTTTGCTTATTCCCCTCTGTGCTTCACCCCTACC | 1799 |
| | | CAGCTTCCCGCC | |
| 13239-L5-2 | 1q23.3 | CTGAGGACAGGGGTAAGTCTGGGGAGATGGGGGGAGCTCTGCTGAGGGTGCACAAGGCCCTGGCTCTACACACATCCCTGTCTT | 1800 |
| | | ACAGAG | |
| 13240-L5-2 | 11q12.2 | GCAGTGTGATTTGGGGCCGGGAATGCCGCGGCGGGGACGGCGATTGGTCCGTATGTGTGGTGCCACCGGCCGCCGGCTCCGCC | 1801 |
| | | CCGGCCCCCGCCCCACACGCCGCAT | |
| 13241-L5-2 | 11q12.3 | CTCTGTTACCTTGCTTGCTCTGTGTGGTTTTGGAGGGGTGTGGAAAGAGGCAGAACATTCGTTCACTTTCCTGCCTTCCTCTGCAC | 1802 |
| | | CAGCTAAAAAGTTTGCAGAGAC | |
| 13251-R5-2 | 1q25.2 | GGCTGGGACCACCTCCTTGTGCCCCCTCCTCTGCCATGGCACCTGGCTGTCACCTGCCTGACCTCAGCCAGGGACCAGCCATGG | 1803 |
| | | CAGAGGAGGGGGCACAAGGAGGTGGTCCAAAGGCCCA | |
| 13259-R5-1 | 12q24.11 | CAGGTATGCTCTGTGACAAGATTTGCAGCATTTTAGAGAGCCCCTGGCCTGCTGGGGTGGGGACAGATACAGTGGTAATTCTGGC | 1804 |
| | | AGAAGATGAGGCCT | |
| 13267-L5-1 | 1q42.13 | CACCATAGGTGAGGTGGGGGCCAGCAGGGAGTGGGCTGGGCTGGGCTGGGCCAAGGTACAAGGCCTCACCCTGCATCCCGCAC | 1805 |
| | | CCAGGCTTCAACGTGG | |
| 13281-L5-3 | 12p13.31 | GCCGCCCCCACCCTGTCCCTCGTCACTTCCTCTGTCCTGTGGGGTGGGGGTGCAGGCGCTTCTCCTTTAGCTGTGCCGCACTTCT | 1806 |
| | | CCCTACAGGCCAGGAGAAACAGAACACCGTGTGCAC | |
| 13283-L5-3 | 1p36.11 | GGGCACGGGGGTTGGGTGTGCAAAGGGTGGCAGCAAGGAAGGCAGGGGTCCTAAGGTGTGTCCTCCTGCCCTCCTTGCTGTAGA | 1807 |
| | | CTTTGGCCTGAGCAAAGAGGCC | |
| 13285-L5-3 | 1p36.32 | CTGGGGGTGACCCCGTGCAGGGGCTGAGCTGGGCGGCTGGGTGCATAGCCCATCTGTAGCCTAAGCAATGGTGCAAAGCCCCCA | 1808 |
| | | CGCCTTGGTTTCCTCTCCTGAACGCGGGCACACAGAG | |
| 13287-L5-3 | 1p35.2 | TCCGCCGAATAACTCCATGTGGGTCTTGGGAGGAGGGTGGGGTGGCTCCTCTGCAGTGAGTAGGTCTGCCTGGAGCTACTCCAC | 1809 |
| | | CATCTCCCCCAGCCCCTGTATGGCTGGGAGGGGAA | |
| 13291-L5-1 | 1p34.3 | CGGGAGGGAAGGAGGGAGGAAGGGGCGCTTGGGCAGAACCAAGGGTGGCAGATTATCCTAGGGACTCTTGGGGCAGAACCAGA | 1810 |
| | | CGCCTCTGCGTCCTCCCCTCTCCCC | |
| 13293-L5-1 | 14q32.2 | GTGGCGAGCCAAGGGGCGGAGGCCTGGCCAGGCAGAGGCTCCGAGGCCAGCCAGGCCTCCTAACCCTCCACC | 1811 |
| 13298-R5-1 | 1p34.1 | GTACTCCCTCACAGCTGCATTTCAGTGCCTGGCTCTGACCTGGCCACAGCACACACCATTGCTAAGTGTGGGGCTGTGGGGAGGC | 1812 |
| | | TGAAGCCCTGCACCCACTCCAGGCTGAAGGCAGT | |
| 13303-L5-3 | 14q32.13 | TGGGAAGAGGGACATCGTGGAAAGTTGTGGCAACTGGGTTCAGGGGAGGCCAGGAGCCTGCCAGCTGTGGCCTCTAAAAAAATA | 1813 |
| | | AAACCCAGGTGCTCACTGGCCCTGCCTTCCCAC | |
| 13308-L5-1 | 15q23 | GTGGAGAGGTGGAGGTGGATGGGCTGATGTGAGTGTGTGTGTGTAGACAGCCTTTCTGACAAACAAGGCTGTATTCACCAAGGAT | 1814 |
| | | CTCCTGGCGGGTATCTCAAATTCCATCATTCATC | |
| 13310-R5-1 | 15q23 | TTTTGGTAATTTAGACTGGAAATGGCAATGGTAATTCAGAAAAAGAAATAAATTTTAATTATTGGTGGTGGTAGTGGCAATGGATTTT | 1815 |
| | | CAAAGA | |
| 13312-L5-2 | 15q24.1 | GTGAGTGGGGCTGGGCTGTGGGGGAGGGGTGGGGTGGCAGGGAACAGGCAGACCATCCCTTCTACCCACAGGATCCTGCTGCT | 1816 |
| | | GCAGACAG | |
| 13313-L5-2 | 15q24.1 | CTGATTAGGGTTAGTGGGAGGGACACGGCATGGGAGACAGGGAGATTTGCCTGTTGCCCTGAGCCTGACTGAGCTTCCTTTCTCC | 1817 |
| | | CTAGCAC | |
| 13316-R5-2 | 16p12.3, 16p13.11 | GCTCAATGCCTCCAACGCAGTCAGCTGGGTCTCAGCCACGTACAACCTCACGGTGGAGGAGCCCATCGTGGGCCTGGTGCTGTG | 1818 |
| | | GGCCAGCAGCAAGGTGGTGGCGCCCGGGCA | |
| 13316-R5-2 | 16p13.11 | ATCCGGCTCAATGCCTCCAACGCAGTCAGCTGGGTCTCAGCCACGTACAACCTCACGGTGGAGGAGCCCATCGTGGGCCTGGTG | 1819 |
| | | CTGTGGGCCAGCAGCAAGGTGGTGGCGCCCGGGC | |
| 13326-L5-2 | 17p12 | TGCCATCGAAGGGCGGGTGGGGGGAAGCCGGAATCTCTGTCCACATGCTCCAGGCACCTAGCTGCTCTGAGGGGCAGAGAGCAG | 1820 |
| | | AGGTGGTGCTCCCCCCCATCAGCATTTTGAGTTGGCT | |
| 13328-R5-2 | 17p11.2 | AGCTTGTATCACCTGCCACTTGCACCTGTATCACACCTGTGTGTTACACCTGTCACTCCTGTGTGTCACTCTTGTGTGTTGCAGATG | 1821 |
| | | TGGGGGCAGGTGAGCATCTGC | |
| 13332-L5-1 | 17q21.31 | TTGGGAGGGAAGACAGCTGGAGAGTATGGTCACAGCAGCATCCTCCTCTGTTTTCTTTCCTAGAT | 1822 |
| 13332-L5-1 | 17q21.31 | TTGGGAGGGAAGACAGCTGGAGAGTATGGTCACAGCAGCATCCTCCTCTGTTTTCTTTCCTAG | 1823 |
| 13334-L5-3 | 17q21.31 | TGGGGCAGACAGGGCACAGTGGGAGGGGAGGGGAGTCCTGCCAGGAGGGCCACCTGGTGACTCCACATCCTTTCTCACCCCCC | 1824 |
| | | AGA | |
| 13335-L5-3 | 17p13.2 | TGGCTGGGAGAGGAGCATAGGATGCGGCAGGAGGGCAGTGGAGGCTGAGGTACGGATTTCTAGGCCCGCCCTACCCTCCTCTCT | 1825 |
| | | GCCCCTAGTGCCCGTGGCCAA | |
| 13337-L5-2 | 17q24.3 | ATCACGGGTTCCATGTTGGGGGAGGGAATGTCAGAAAAAGAATGTCCGTTCAACATTCCCTCTCCACCCTTAAATCTCTATGTGA | 1826 |
| 13339-L5-1 | 17p13.1 | GCGGCGGACACCATCTTCTTTAAACCCTCAGTCCGTATTGGTCTCTATGGCATCCATAGAGGCCATTCGGCTCTGAGGTCCTCAGT | 1827 |
| | | AAAGAAACTTAGATGGTATTACTGTGT | |
| 13343-L5-1 | 17q25.3 | TGAGGGGGAGGGGCGCTGCGGGAGGGGTGGAGGGCCCAGGGAAGGGTGAGGGGCCGGGAGCCACTCTGCCCGGCACTCTCC | 1828 |
| | | GCCCAGAAACAGCCCAACGCCCCTTTCTTTCCCCTTT | |
| 13349-L5-2 | 18q23 | AGAGGAAGGAGGCGGCTGGGATAGCCCACACAGGTGGTGGGAGTCTGTCCTCTCCCTGCCAGGGTGCAGGACAGCAGGTCTCAA | 1829 |
| | | TCTCGCCCAGTGGGACTCAGTGGTCCCTCATTCA | |
| 13353-L5-2 | 19p13.3 | ACAGGCCTGGATTTCAGAGGGCGAACATTTCTGTGGCCGAAGCTCCCAGTGCGTTTGCAGTCCTTGGAGACGGCCGCAGACACAT | 1830 |
| | | TTGTTCTTGGCCTGTCTCCAGGTCTGTA | |
| 13354-L5-1 | 19q13.11 | ACTGAGGGGGTTCCAGGAGCTTTGTGGGGCAGCATTGGGAGTGTGAACCCCCATCCAGGTTCTCACCTCTCAAACTTCCTCAGAT | 1831 |
| | | GCTGAGCCCCACTTAT | |
| 13355-L5-2 | 19q13.12 | GTTTCCCATTCACACTGCAGGAAAGGATAGGGGTGGGTGTGGTCAGAGGACCCTCACATgGCTCCACTCTAGAAGCTGGCATGGG | 1832 |
| | | CAGCTC | |
| 13356-L5-2 | 19q13.2 | TGGTGAGCACCGTGCTGGGTGGCAGGGAGGCCAGGGGCCCACCTAGTGCCACCTTTCCGTGACTCCTGCTGTCTCCCTGCAGCC | 1833 |
| | | CGTCGGGGATGAGAGCCAGG | |
| 13358-L5-2 | 19q13.32 | CGGCCAGTGACTTCCCCAGGAGTGTGGAGGGGGTGGTGAGGAGGAGCACCTGGGCTCTCTACCCCTCTCCTCACAGAAGTACCT | 1834 |
| | | GAAACTAGGTC | |
| 13361-L5-1 | 19q13.33 | GTGTGCAGGGCTGGGGTCACTGACTCTGCTTCCCCTGCCCTGCATGGTGTCCCCACAGGGACAGCATGGACAGTGTCAAGCAGA | 1835 |
| | | GTGCGGCCCTGTGCCTCCTTCGACTGTACA | |
| 13363-L5-2 | 19q13.42 | AGTCGGGTGGGATGTGAGGGTGTCAGCAGGTGACGGTGGGGGCCACGCTGACAGCCGCACCTGCCTCTCACCCACAGTGCAAC | 1836 |
| | | CAGAGACCCCTCTA | |
| 13364-L5-2 | 19q13.43 | AGGTGGAATGGGCTGAGGCTCAGGAAGGGTCCTGGGATACAAATGCTCACTCTATGGGTCTCTCCCTGAGCAGGACATTGGTTACC | 1837 |
| 13365-L5-3 | 19p13.3 | CCAAGCAGCTTATCGAGGAAAAGATCGAGGTGGGTTGGGGCGGGCTCTGGGGATTTGGTCTCACAGCCCGGATCCCAGCCCACT | 1838 |
| | | TACCTTGGTTACTCTCCTTCCTTCTAGGG | |
| 13365-L5-3 | 19p13.3 | GAGGAAAAGATCGAGGTGGGTTGGGGCGGGCTCTGGGGATTTGGTCTCACAGCCCGGATCCCAGCCCACTTACCTTGGTTACTCT | 1839 |
| | | CCTT | |
| 13370-L5-2 | 20q13.12 | TACCGCAAGTATGTGGAGCAGAGGTGAGGGTGGGGCATGCATGTGGTTAAGCCACCAACCCCACCAGACCTTTCCGCCACACTCT | 1840 |
| | | CATCCTGCAGGTAC | |
| 13373-L5-4 | 20q13.33 | TCCCTGCACCCCTGCCTGTACAGGTGAGTGGGAGCCGGTGGGGCTGGAGTAAGGGCACGCCCGGGGCTGCCCCACCTGCTGAC | 1841 |
| | | CACCCTCCCCCCACAGCACCCTGTGCCGGGGC | |
| 13374-R5-1 | 20q13.33 | TGGCGCTGCTCTGCTGTTCCTCTGTCTCCCAGACTCTGGGTGGATGGAGCAGGTCGGGGGCCAGGGGACAGGAAGGCTAGGGCC | 1842 |
| 13374-R5-1 | 20q13.33 | CCAGACTCTGGGTGGATGGAGCAGGTCGGGGGCCAGGGGACAGGAAGGCTAGGGCCCCAGAGACCTGTCCTGGGCCCCATGTC | 1843 |
| | | CAGCTCTGCCCTTAGTGCTTGG | |
| 13375-L5-3 | 20q13.33 | ACCCTCTCAGGACCCCTCCTAAGGGGTAGGCAGGGGCTGGGGTTTCAGGTTCTCAGTCAGAACCTTGGCCCCTCTCCCCAGACCC | 1844 |
| | | CCAGGCTGTGGTGAGGGTCTGAGAGCTGGTAC | |
| 13376-R5-1 | 2p25.1 | CCAGAGAGGAAAGCTGCAGGTGCTGATGTTGGGGGGACATTCAGACTACCTGCAGCAGAGCCCATGGCT | 1845 |
| 13380-R5-3 | 2q21.2 | TAATCTCCAGTGAAAAATAAGCATGAGTGTGAGGCTGAAAAGGCTGGAATCATTCTCCTGCGTGTGCATTCTTCCGGGGCTGGGAG | 1846 |
| | | TT | |
| 13385-L5-1 | 21q22.3 | ACTGTAGGTGGCGCCGGAGGAGTCATTTCCCATCACTAATGGCTTCTCTTGCACACCCAG | 1847 |
| 13396-L5-2 | 22q11.21 | GGGACAGCGGTAAGGAGCCCGAGTGGGGCGGGGCAGGTCCCTGCAGGGACTGTGACACTGAAGGACCTGCACCTTCGCCCACA | 1848 |
| | | GAAAGACTCCTAGCCAGGAGGGCCTGC | |
| 13403-L5-1 | 22q13.1 | ACCAGGTGGGCCTGGCCCCAGGTTGGGGGGACACGGGTGGGTCCCGGCACCCCTCCCCTGACCACCGTGCCTCTCCCAGGA | 1849 |
| 13412-L5-1 | 2p16.3 | CTGGGACCAGGGGGCGCCATCTTGACTCATGGTCCAAGATGGCGACCTGGAACGCTGAGCG | 1850 |
| 13423-L5-3 | 3p24.3 | AACTAGGCTCCTAAAAACAAATAGCTTCAGGGAGTCAGGGGAGGGCAGAAATAGATGGCCTTCCCCTGCTGGGAAGAAAGTGGGT | 1851 |
| | | CAAGGGGGAAAGGGTG | |
| 13425-L5-3 | 3q26.33 | CCTGTTGATTCCCAAGAACCTTGATGCGGCGCATATGACTGGGAGGGCACCTAGAGCATTTCTGGGTGAATAAGGCCCCTCCATC | 1852 |
| | | CCTCAACAGCAGCACAAGTGTGTGTGAAAAAGGA | |
| 13430-L5-3 | 3p21.31 | CCTAGGAAAGGCTGCTGGTAACTGGGATGGGGGTTGGGGGGAGGTAAGAAGTCTCTGACTCCTCCTCTACCTCATCCCAGTTCCA | 1853 |
| | | TCACCTGAAGTGGACCTCTTGGGAC | |
| 13431-L5-3 | 3p21.31 | GCCTCTTCCTGTCTCTGCTGTGAGTGCGGCAGCGGCAGTGAGTGGGTGTCGACGCGGCGGAATGCCCGTCGCTGCTGCTGCTGC | 1854 |
| | | TGCCCGACGGGCCTGGGG | |
| 13432-R5-1 | 3p14.2 | TGCTTTCTGCATTCTTCTCCCTCCCCGGTCTCTTGTGACAAGCCATACTGTTAAATATCAGAATAGTAGGTGATTACGTGGAGTTTG | 1855 |
| | | GGGAGGTGGTAGGAAGTGCCAGAAACTGTAAA | |
| 13456-R5-2 | 4q12 | CCAGGAGCTACCAAGCAGAGGTTTATTCAGTCTCCAGAAGGCTATGCAGGTTGGAAAAGATTTCATAGCGGGGCATCTG | 1856 |
| 13458-R5-2 | 4p16.1 | GCTGGAGCCTTCCCCTCCCCTCCTCGGCACTTCCCCCACCTCACTGCCCGGGTGCCCACAAGACTGTGGACAGTGAGGTAGAGG | 1857 |
| | | GAGTGCCGAGGAGGGCACAGCTGTGCCTCAGA | |
| 13461-L5-4 | 5p15.33 | TCCGGGAATCTGGAGGTTTCTAGCACTTTCACTTTCTCTAGGGGGTGGGGACGGGGCTGGGGAGAGAATCCCCCAGCCCTGTTCC | 1858 |
| | | CTCCATCCTGGCTCCAAATCCCAGTTACTCCCCGGA | |
| 13463-L5-2 | 5p15.33 | GGGGACCTCAGGCTGGGGGGCTGGTCCGAGTCCTGGATCCTCAGGGACTCTGGGAAGCTGGAGCTCTAGCACCCTCCTCCC | 1859 |
| 13489-L5-1 | 6p21.2 | TCTTGTTCCTTGGCTTGACCACAGGCTTTCCCCCCAGCCAGGGGCTTCCTCCCCTCACTCCCCTCCCTGGGCTCTGCCTCCCAATC | 1860 |
| | | AGAACCACCTCGAGC | |
| 13497-L5-1 | 7q22.1 | GCGGTCCCCTGGGGGCTGGGAGCGAGGGGGGCACAGATCTGATGTGCCCCCCACCCTCTCACAGGACTGG | 1861 |
| 13513-L5-1 | 7q11.22 | CTTTGGTGAGAGTAGCACCACCCAGGGAGGATTCAGGCATTAATCATCCCTGGCAGAGTGCTCCCTGGAAGTTTACTCTGAAGAC | 1862 |
| 13519-L5-1 | 8q24.21 | GGGGGTGGGAAGCGAGGTTGGGTAGAGCTAAGGTATCAGCAGGACATAGTAACAAATTAAAATATTATCTCTGGCAAATGATAATA | 1863 |
| | | TAGATCTAAACTTTCAGTCCCAAACTCAA | |
| 13525-L5-2 | 8q11.23 | GGCCAGAAGACGATGGCGGTAGGGGAGATCACGCGAGAGCATGGCCTCCACCTCTCCTCCCCACCGCCATCTCCACGTTCTCGC | 1864 |
| 25-R5-1 | 2q31.1 | TCCCGCAGCCGGTGACTGGAGCCCACCTCTGCAGAGACAAAGGTTAGAAAAAGAGGGGGTGAGGCTCTGGGAAAGCAGAATGCG | 1865 |
| | | GGG | |
| 266-R5-2 | 12q14.3 | GTTGCTATTTCCCTCAGTTGAGGGCGAAGTTAGCAAATCCGTAGCTGCAAGTCTCAACTTGGGGGAGGGGGCGAC | 1866 |
| 2786-L5-3 | 2q31.1 | AAGCCCTAGAGATCAAAAGCATTAGTATGGGCAGTTGAGCGGGAGGTGAATATTTAACGCTTTTGTTCATCAATAACTCGTTGGCTT | 1867 |
| 2811-R5-1 | 17q25.2 | AGCATGGAACAAGCCAGAATCCCTCTCTTACCCCGAGAGCTGGTCCCTCCAGGTCAGGGTTGGGACACAGTGGCACGGGGTGGC | 1868 |
| | | TGTGGGTGGCTTGCACTGCCG | |
| 2819-R5-4 | 15q22.2 | AATGCCAGTGAGTTTGAAAGGCACTTTGTCCAATTAGAAGTGTGGAGAAATATTCATCCTGTCCATGACAAAGATGAAGTGCTTCTT | 1869 |
| | | TCAAAAGCGGCGGTGGCAGGCTG | |
| 3717-L5-2 | 1q21.3 | TGTGAGTGGGTTTGGGGTGAGGCTATGGGGAGGGCGGGGTGCCGCCTTGCCCAGCCCCTGAGGGCCCCAGCCCAGTACA | 1870 |
| 3732-R5-1 | Xp22.12 | TCTCTTTCTCTTTTTGTAAATATACCGTCATATATAAGCTAAAATTTCTCTTAGGGTGGTGGGGTTTGCTGGCAGGGAAAGGGA | 1871 |
| 3799-R5-1 | 11q13.1 | GAATTTGCCCTACGGTGTGACCCCAGCCTCTCCCTCTGGCCACAGCCAGGGCCGGCGGGGGGCCTCTGGGAGCATCTTCAGCAA | 1872 |
| | | GTTC | |
| 3897-R5-2 | 9q12, 9p11.2 | CGGAGCCGCCCGCGCCAGCCTCTCCATCTCGCAAGTTTTAATTAACGCTGAGGGGGAGGCGGCTGACGGGCGGGTCGG | 1873 |
| 3942-L5-1 | 1p31.3 | GGGAGTGGGGGGATCTGTTTGGCAACTGGAGTGAAGGGATTGCCCTCCCCCTGCTGGGATCCCCCCAGCCC | 1874 |
| 3952-L3-1 | 1p36.32 | CCCCGGCGAGGGGTGTCAGATTGAGTGCTCTGTGCGCATGTGCGAAGGTGTCCAAACTGACAATGCTGGGG | 1875 |
| 3953-R3-2 | 9q33.3 | GCTCCTGCTCCGCCGCGGGAGCTGCTCCGGCGGCCGCAGGGCTCGCTCGGGAAGCTGAGGCGGCGGAGGCTGGAGT | 1876 |
| 3966-L5-1 | 3q27.2 | GGCGAAGGCGGCAGCGGCGGCGACAGCTCTGGGGTTTGCGTCTCGGGGTGTGTCGGCCGCCGCTGCTGCTTGGGCC | 1877 |
| 3995-L2-2 | 7p21.1 | TGGCCTGACGTGAGGAGGAGGGACTTTTCGAAGTTTTATAGGAAAGTTTCCGCTTTCCAGTCCCCCTCCCCCGTCCCA | 1878 |
| 4013-L4-1 | 15q22.2 | ATGGTCCCCCTGCTGATAGCTCAACCATGCAAGTGCCATAGGAAACAGACTTTGGCATTTGAGCTGCTCACAGTCTGGGTCAT | 1879 |
| 4026-R5-1 | 10q24.32 | GGCTCTGGGAAAGCCTTCCTTTCCCGGCTGGCCTGGCATTCAAAGCCAGACAAAGGGGGGCTTTCTCTCTCGCC | 1880 |
| 4026-R5-2 | 10q24.32 | GGCTCTGGGAAAGCCTTCCTTTCCCGGCTGGCCTGGCATTCAAAGCCAGACAAAGGGGGGCTTTCTCTCTCGCC | 1881 |
| 410-R5-1 | 5q31.3 | CCAGCTCCGCCAGCTCCAGCCCCAGGTCCTGAGCGATGCGGCCCACGAAGGTGCCGTGTTTTGCTTCCTCGGGGACGGAGTAGT | 1882 |
| | | GGAGCTGG | |
| 4130-L5-1 | 17p11.2 | GGGTGCTGGTGGACATGGACGGCGTGCTGGCTGACTTCGAGGGCGGATTCCTCAGGAAGTTCCGCGCGCGCTTTCCCGACCAGC | 1883 |
| | | CCT | |
| 4143-R5-2 | 22q12.3 | TCAGCGTCAGGAACTTCATCCTGGCAGCCGACCTCATGAAGAGCATCTGGCTGCTGTTACCAGGAGGAGAGCAAGACGCTGA | 1884 |
| 4258-L5-1 | 2q31.1 | ACGGGAAAAGAGGAGAGGCACCAGATATATGTTCTCTAGGCCTTTTAGAAAACATGGGGTTTTTCCTTTGGCCACGT | 1885 |
| 4315_C-L4-1 | 1q22 | GGGGAGGGGACCGGGAGGGCCGGGCGGCCGCGACCCCCAACCTCTCGGAGGAGGGGCTGCCGCTCGCCGCTCCGCTCTTTGT | 1886 |
| | | TGTTTGGGGCTCCGCGCCTCCCCCTCTCTCCCTCCTC | |
| 4315_D-R4-1 | 1q22 | GGGGACGTGGCCCCTCCCCCCCGGAGCGGGACTCCAAGAACTCCGGGGGGCGCTGGGGGCTGACTTTCC | 1887 |
| 4315_E-R4-1 | 1q22 | TCCCCGCCACCCTTGGAGCACCTCAGCGTTCTTAGGGGAAGCCAGAGCCGGGGAGGATGCGGGAATAGGTTTGGTGGGGG | 1888 |
| 4315_F-R4-1 | 1q22 | GATCAGGTTCCCCTCCCCCGCATACACCTGGGCGCAGGTGAAAGCTCAGGGAGCGGGTGGGGGAGCCCGGGTT | 1889 |
| 4315_I-L4-1 | 1q22 | CTGGGACGGGCGGGGCGCCGAGGCCCAGGGCGCCTGAGGGGCGCAGAGGTGTCAGCGTGCAACCGCCGCCCCCCAGCGTTCC | 1890 |
| | | CGCCACCACCGCCACCACCCTCAAAGCCCGG | |
| 4315_K-L4-1 | 1q22 | CCGGGGCTGGGGGTGGAGGATGGCGAGGATTTGACAAGTTCAGGGCCCCCTGGGATCCTTTCCCTACTCCCTGGTCTTGTTGGA | 1891 |
| | | CACCCTGTTTACCTGCCCTAATTGCCCCGG | |
| 4315-R3-2 | 1q22 | GCTCCCCGGCTCCCTCACTGCGGCAGCCGCGGCCCCATAAATCGTGAGAGCGACGTGCTCCGGAGCCGAGAATGGAGAGGGCC | 1892 |
| | | GGGGAGC | |
| 4338-L5-2 | 1p34.3 | GCTGAGCAGTGGGGCCAGCTCCCGCCCACCCCCAGGAGACTGGTGAGGAGAGCTGTCCGGCTGAGCAGC | 1893 |
| 4340-R3-1 | 10q21.3 | GCTCTGCTTCCAGGCTGTATTTTTAGGCTGGCATTTAGGTTTGGCCTGGGGACAAGGGGCTGGAAAATGCAAGGC | 1894 |
| 4346-L5-1 | 2p23.2 | CCGGTGCGCGGCCGCGGCGAGGGCGGGGGAAGAAAAACACCCTGTTTCCTCTCCGGCCCCCACCGCGGATCATGTACCAGG | 1895 |
| 4361-R5-1 | Xp11.22 | TGCTGGAGGTAAGGGTTTTCTGAAGCCTGGTGCCATGGCCACATGTGCACATGAGGGAGGGAGACGCTGAGGCTAGCA | 1896 |
| 4498-L3-2 | 6p22.2 | TTCCCCAGGCAGCAGCAGGCGCACGGCCGTCTGGATCTCCCTGGAGGTGATGGTCGAGCGCTTGTCATAATGCGCCAGGCGGGA | 1897 |
| 4516-L5-1 | 10q11.22, 16q22.3 | GGCAGAGCCAGGCAGGAGCCAGAGTCAGCCTGGGGGGTGATGGAGCTGAGGCCATCACCGGTCTGACAGTGGACCAGTATGGC | 1898 |
| | | ATGCT | |
| 454-R5-1 | 5q31.3 | CCAGCTCCGCCAGCTCCAGCCCCAGGTCCTGCGCGATCCGGCCCACGAAGGTGCCGTGTTTGGCCTCCTCGGGGACGGAGTAGT | 1899 |
| | | GGAGCTGG | |
| 4593-R5-1 | 15q23 | CAATCAATTAGCACATGAGTAATACCAAGCCCATTAGGACAAACTGATGCCGGGGGAGTTATGTCATCTGCTATAGAAATGATTG | 1900 |
| 4610-R5-1 | 8p12 | GCCCAGTTAATTGGTCTCTCAACCTACATTAGCTGTTGCATTGCAGCCAATTAGGCAGGGGCCAGAGGGC | 1901 |
| 4610-R5-2 | 8p12 | GCCCAGTTAATTGGTCTCTCAACCTACATTAGCTGTTGCATTGCAGCCAATTAGGCAGGGGCCAGAGGGC | 1902 |
| 4642-R3-2 | 11q24.1 | CAGCCTGCCTTTCACATATCCGAGCCCTCTGTGACACATCAGATTTAATGAGACTGCACAGATCTCAAATAAGGAAGGGGAGCGCTG | 1903 |
| 4666-R5-1 | 1q21.3 | GCCGGCTCCAACCCAGAGGCCCGGAATAGGCGCGGAGTTATAAATAGTGCCACCCGCAGGTGTTGGGGGGAGTCGGC | 1904 |
| 4792-L5-2 | 2q31.1 | GGCTTGGTTATGGGGGCAGTGGGGGCTGTAACTGGCTTCGTATGTGGCCATTTCCTGCCTTTGGTGCAGTTAAACCAAGCC | 1905 |
| 4801-L5-2 | 1q32.2 | ATTAATGTTTTTGTAGCAAACAGGAGGCAGAGTTCTCCAAAGGCTCTCATCTCTGTGCTTCCAGAAAATATTGAT | 1906 |
| 4813-R3-1 | 16q22.3 | ATGACATCTGATTGATAGCTTGGGCCAAAAAGGTTGGCAGGCCTGAAGGGGCGGGAGGGTTAACAGCCCGATTGTAAAATCAATG | 1907 |
| | | TCAT | |
| 4875-R2-2 | 3p22.1 | TGTGAAGCCACAGGAAGGGGCTCTGTGACATCACAGGTAGGGGCAGTGTGAAGTCACAGGAAGGGGCTGTGGGAAGTCACA | 1908 |
| 4912-L5-2 | 12q13.2 | CTTGTTAGACAATCACAGCTGGGGGCCAGGGGTAAATTTAGCCTTTGTTCAGCCCCCAGTTATGTGTGGGATGCAGG | 1909 |
| 4929-R4-1 | 17q25.3 | GACGAACCTTGGCCGCAGTCCTTGCGAACTGTTCGCAAAACAGTGCGGGCTGCGGTGGGTCAGCGTC | 1910 |
| 5032-R5-1 | 14q32.31 | GGGCGCTCCAGTCTCGACGTTCCCGGGGTAGAGAGCAACGTCCGGGGACGAACGGGACGGGTGCGCCC | 1911 |
| 5048-L5-1 | 11q13.1 | GGTGTGCAGCAGAAGTACGCGTACAAGGAGCGGCGGGCCAAGCTGTACGTGTGTGAGGAGTGCGGCTGCACATC | 1912 |
| 5071-R5-2 | 17q12 | GATTCCTGCTCCCAGAGCCATAAAGTGGGAGCCCCCATTTATTAATTGGGCTGGGACTGGGGCGGGGGTC | 1913 |
| 5107-L5-1 | 11q23.3 | CAGTTTGTACTGGGGGGTCAAAGGGGAGTTCTTTTCCGAAGAATTCTGGGAGAGACGCCAACTAGAGCAAGCTG | 1914 |
| 5210-L5-1 | 1p31.3 | TGGGGTTGGATCCCCATGGGGCAGCTTTTGGACCACCAGTGTTAACCCAGGAATTGGAGCGATCTAAACCCTA | 1915 |
| 5342-L5-1 | 8p21.2 | TGGAAGGAGAGCAGCGGCATTTGGTTTGGTGGTGGGCAGATTTTCTTTTACGACTGCTAAATGCCTGCCTTTCTCCCCA | 1916 |
| 5491-R5-1 | 6p21.33 | GCCTCCCCTTCCAGGTCATTACCTGCGGCCGCGGAGGCAACAGCTGCCACCATGGCCTGATGAGTGATCTGGTGGGCGACGGC | 1917 |
| 5521-L5-2 | 5q31.3 | AGAGGGTGTGCTCTGGGGAGGGCCCACCCAAGACAGACCTCATGGCCTTCAGTCCCAGCCTTCCTCAGGGTCCATCCTCT | 1918 |
| 554-R5-1 | 14q24.3 | GGAGAGAGGCGCAGACAAGAGAAAATAAGCCTGCCCAGCAATCATGTCTGGGGCTGCTGGGAGGGCTCTCTCTGTTCTCTTTCC | 1919 |
| 5554-R5-2 | 1p34.3 | CCCCACCAACCACCAGTGCTCAGGACTTCTGCAAATCCCATTCGGATCTGGGAGCAGCTGATGAGGGGGTGGGG | 1920 |
| 5638-R5-2 | 6q23.2 | GGCTTTGCCCTTTTCGGTGACACAGGCTGTTGCTATTCCAAGCAGCCTATCACAGGCAGGGGGAGGGCC | 1921 |
| 5640-L3-1 | 1p34.1 | TCTCGAGAGGGGCAGGCACGGTGTTCCATGGCAAGACGGCGGTTGATGTATAGGCGTGGCATGAAGCTGGGCTTGCTGCTCTCA | 1922 |
| | | GA | |
| 5749-R5-1 | 18q23 | ACAGGCTCATCCCTCTGAACAGATGAGATTAGTCGATCATGTAAAGTCAAAAGGGGGATTATGATGCTTGT | 1923 |
| 5757-L5-1 | 19q12 | GTTGGCGGCACGGTAGGTTCATTAGTCAATAAAGCATTGCCACGCGTTTTATTGAATTGTAACCCTATTTTGCCCTGAT | 1924 |
| 5854-R5-2 | 11p14.1 | GCCCTCCCTCCCACCGCACTTACACCTGAACTTGTCTCCAGCACTGCGGACACCCGGGTGACACATTCTTTCGGAGAGGGAGGGC | 1925 |
| 5956-L5-1 | 1q41 | CTATGCGTCTTGACGGATTTGGGGTTGGCAGAGCAGGCTGCCCCTGCTTTCTATCCCCATTCAGTCCACTTATAG | 1926 |
| 5995-R5-1 | 7q11.22 | CCTGCTTGATTTGCTTAATGGAAGCTGACAGTGAAGTTCAACCCTGATTGTCAGATTTCAGTAGGAACCTCAAGGGGG | 1927 |
| 6008-R5-1 | 4p15.32 | CGACTTTATCACCCATCGGTTATCTGTGTCGCCTGAAGGAACTCCGGGTAAGGTACAGGAAAAAGGTGGGGGTATTGTTG | 1928 |
| 6008-R5-2 | 4p15.32 | CGACTTTATCACCCATCGGTTATCTGTGTCGCCTGAAGGAACTCCGGGTAAGGTACAGGAAAAAGGTGGGGGTATTGTTG | 1929 |
| 6016-R2-1 | 1q23.3 | TTTCTGTATATGTTTCTGGAGTCCTGAGCCTGAGCTAAACAAAAGCAGGAGGCTGACGGGGCTGCTGGAGTTTGCAGAGA | 1930 |
| 6023-L5-1 | Xp11.4 | GGTCTCTGGGGGGTTGGACCAGTCATCTGGCTCTGCCTTCCTCAGGGCAGAGCTGGCTGCTGGTGAGGCCAGGAGGCC | 1931 |
| 6087-L4-1 | 9q33.1 | GATGGAGAAGGTGGCAGGCAGTAATGGAGACAGAATTTCTGTTAACTGCTGTAATTAATGTTATGTCTCATC | 1932 |
| 6096-R5-1 | 3q29 | GCCATTTGGTACCTGATGTGATCGGGCTTTTTCCTGTCGTGTGAAAAAACGGGGCAGGATTAAAACATAAGGGAAAGGTGGT | 1933 |
| 6192-L5-1 | 11q25 | GTGCTGGGTGGGTGGTTTTTTATCTTCACGGATTTATGGAGTCCTTAAAACATCTGTTCCGTTCTGATTCCCCCGCTCAGTAC | 1934 |
| 6198-R5-2 | 1q25.3 | GCCGCCAGCACCCGCGGTGCCGCGGGGCCGCTCCGAGGAGCCTGAGAGACCCACGGAGGCTTCGCGGGAAGACGCGGCGGCG | 1935 |
| | | GCGGC | |
| 6242-R5-1 | 8q21.13 | CCCTCACGAACTGTGCGGTAATGAGAAATCCAAACACCAGGTGCTCCAGGGGCTTTGGGTTTGTCACATATGCCACTGTGGGGG | 1936 |
| 6287-L3-2 | 1p34.1 | AGCAGCCAGGTGAGCCCCGAAAGGTGGGGCGGGGCAGGGGCGCTCCCAGCCCCACCCCGGGATCTGGTGACGCT | 1937 |
| 6385-R5-2 | 11q13.1 | GGCTCCGTCGACGTTCGGAGCCTGCTGGCCCGTCGGGCAGCTGTCGGGCCGCGGGAGTCGGTCCGTGGGCAGGGCC | 1938 |
| 6409-L3-1 | 11q13.1 | GTTCCAGAAGGCGGCGCGTGCGGTTGGGAACGCGGAGCGGACGGATTCGATTCAACGGGGTTCCGGACCGCGCTGCGCTATGG | 1939 |
| | | AGC | |
| 6434-R5-1 | 15q25.2 | GTGGGCTGCATGTTCCCGCATTGCTGGTGAGGGTGCACGATCTGGCACTGCAGCTGGCTGGTGGGAGGGCTGCATCCTAC | 1940 |
| 6490-R5-3 | 1q21.3 | TCCTTCCCCCTTCGTGGCTTGCGGTCTCTCTTCCCCGCCTCGGCCCCCAGGAAGTGTGAGTGCTGGGGGTGGTGAGGTTAGGAG | 1941 |
| | | GGGGAAGCGTCATATGGGGGATGGGG | |
| 6496-R5-2 | 5q31.1 | CTCCCTCAGGCCCCGCCTGCACCTTTCCCAGCCCCCAGGACTCTAGGGGAAGTGGTGGGTGGGGGAGGGGG | 1942 |
| 6584-L5-1 | 12q24.23 | GCTTGGTGAGAGGAGGAGGAGGCAGGGCCGACCGCCACCCGCCTGTCTGCCATCTGGTCCCCTTCCCCTCCCTCCTCTCATTGC | 1943 |
| 6590-L5-1 | Xq13.1 | CAGCTGGGGCAGAGGCTGTTTATTTGGTTTCTCATTAACCAAAGGAAGTGCCTGGATCAGATGGAGCCTCTGCTGCTTGACTG | 1944 |
| 6642-R5-1 | 14q11.2 | ACACTCTCCTCTTGTCTCCTTGTAATCAATTCATTGTCATCAGAAATGTGTGACACCTCGAGGGGAGGGGAGGACGTGT | 1945 |
| 669-R5-2 | 11q13.1 | CCAGCGGCCACCTTTCCTCCCTGCCCCATTGGGACAGTCGAGACTGGATCTGTGGGGTTTCCCGGGAGGGTGGCTCAGGGCTGG | 1946 |
| 6718-L3-2 | 3p22.1 | CTTTGGAGGCAGAAGCTCTGGCCCCTATGGTGGTGGAGGCCAATACTTTGCCAAACCACAAAACCAAGGTGGCTATGGCGGTTCC | 1947 |
| | | AGTAG | |
| 6839-L3-1 | 3p21.31 | AGGGGTGGGGGTGGCAGGGCCCAGCGGGCTGGCAGGCAAACCCTGGTTTTGGCCCAGGGACCTATAATCAGCTCCTGCCCCT | 1948 |
| 6880-L3-2 | 1q42.13 | GGCTTGCAGAATGTGGATGTCTTCGCGGGGGAGGTGGCCACGTTCTCCTGTGAGGTGTCTCACGCGGGTGGGCC | 1949 |
| 6908-L3-2 | 4q28.3 | TGTGGGGCTTGCCAGTCTTGTTCCCCCAGTAGCCTCTGTGCACGGGGACAATGGAGAGCTTGGGCAGGATGATAGCCCCACG | 1950 |
| 6984-R4-1 | 1q21.3 | CCCCACTCCCTTGCAGGCTGCAGGCACTAGGGCTCTCAGGAATTGCAGGGACTTTGGTGCCCAAGCAAATGCTTGGGCAGGGGG | 1951 |
| 7029-R5-1 | Xq28 | CAGGAGCGTGATGCCTACTTGGGTCAGCGGCTGCACAGCAGGTGCGGCTGCTGCTGGGGCAGGGCTCTTG | 1952 |
| 7061-R5-2 | 1p13.3 | TCATGGCAGCGACCCACCTCCAGTCCCCTGGACAATCGGGTACAAGAGACTTAAGGTTGGGCATGGGAAGGGTGGGGTTTCCATGA | 1953 |
| 7066-R5-1 | 15q23 | CAAGGTCTTTGGTCTTGGAGGAAGGTGTGCTACTGGAAGAGGCCACCGAGGCAGGGCTGGTGGGGGCATCTTTTTTCAGGCTACG | 1954 |
| | | GGCCTTG | |
| 7069-R5-1 | 3p21.31 | CTCAGGGAGCCCCAAAGGGTTTATGGGTCTCCCAATGAATGGGAGCCTGTTGAGCTCGGAGGGGGCCGGGCCCGAG | 1955 |
| 7113-R5-1 | 18q21.2 | CGTCTTGCTGGCTCCCCAAGGCTTCCAGGCATTTGCCCATCTGGTGAGGCCTCCGGAGCAGGGGGGCTAATTAGGCG | 1956 |
| 7126-L3-1 | 5q31.1 | CAGGGGCGCGGGCCGGAGAGCGGGTGTGCAAAGTGGGCGCAGGGCCCTGGGGCCGCGCCCCTTGCTCTGCCGGCTCGACTCT | 1957 |
| | | TG | |
| 7141-R5-1 | 9p22.2 | ACTCCACTCTTTGTTGCAACTTGCTGACTCGGGTGTCCCTTGCCAAAAAGGGGTAGGTGGTAGGTTACATAACAAGGATTGGGGT | 1958 |
| 7221-R5-1 | 8p21.3 | GGAGATGTGCGCCCCCTCTGCCACGCCCCCACCTTCCTGGCAGGTGGTGGGCCACCAGGGTGGTGGGAAGTGGCCGGGGTTTC | 1959 |
| | | TCTCC | |
| 7313-L5-2 | 2q33.2, 20q13.2 | CTTGGTGGTTCCTTGAGGGCTTTGATGATCAGGGCAGAGGCAGAAGGCACCACCTCAATCTGGGCCTGTCTGTTCTGAATGGTCA | 1960 |
| | | GTTTCACTGTAATCCTCAGG | |
| 7352-R3-2 | 1q25.2 | GCCTCTGTGCGCATGGATATAATCAGCTTTGATAGGCAGAGGCTGAGGCTGTTTTTCCAATTAGAGCTGTTAGAGGATTCTGGCAG | 1961 |
| | | GGGC | |
| 7356_A-R4-1 | 8q24.3 | CGGAGGTCGCTCGCTCGCTCGCTCGGCTCGCTGACTCGCCGGAGCGCTCTGTGGCGGTCGGCGGCAGGTCGGTCGCGAGAGCG | 1962 |
| | | GGCTCTG | |
| 7356-L5-1 | 8q24.3 | GGGGGCGAGGCTATGTCGCGGTGGCAGCCCGGATGGGCCGGCAGGGCCGGGAGTAACGGGACGTCGCCGCGGAGCTTCTTCC | 1963 |
| | | CCC | |
| 7367-L1-1 | 6p21.33 | CGGTCCCCAGAGGGGGCAGCTCTAACCCTAAACAAGTGCTCAACCCTTGAATGGGCCTGGATGGCTCCCCTGGGGACTG | 1964 |
| 7384-R3-1 | 12q12 | GGCATTTCTTCTTGTGTTTCCTCTTCTCCTCTTCTGGGGAGGGATGAAGGAGATCCTTTGCGAGAGGCATGTT | 1965 |
| 7411-R3-2 | 18q22.3 | GAGTGTGAACTGGCTCCAGCTGTGACAATAAAACAGCAGGTGGCTGCTGTCATTAGGGGTGGCAGATGAGGCAGGGGACTAACAT | 1966 |
| | | TC | |
| 7569-L5-2 | 11q23.2 | GGCCTGTCTTGGGGGTAGCTTTGTGGCCTGAAAACAAATCATCCTTCACAGCTTGCTCCCAAGTCCAATAAGCC | 1967 |
| 7571-L5-1 | 2p21 | CTTAGGGGTGGGGGAGCCCTGTTAGCCCTGTAAATAAAGTTTAACGAGGTGAACAATGGCTGGCTCTGTCCCTGAG | 1968 |
| 7572-R5-2 | 11q12.1 | ATCACCTTTCCCCCTCCCATGTGCTTTCCTTCATTTGAGATCTTTTGACCTTTGGCTTTATTTGGGAGGGGGAAGGGTGAT | 1969 |
| 7660-L5-1 | 19q13.32 | GAGCTTTATCGCTCGGGCCAGGCGGAGGCCGGGCGGCCCCGTGGCTTCCGGAGGCGCCCGGGCGGGATGAGCTC | 1970 |
| 7702-L2-1 | 10q21.2 | GGGGCGGGGAGGAATTCCGGTTCTCTGGGACTTTCCAAAAAAGGCGAAGATCCGGTGCCGGCGGCTCCGCCTCCCTAGCCCT | 1971 |
| 7736-L5-1 | 8q24.21 | GGAGACCGTCGCCTTCTGGTGGGTGGTGGGGATGGACTTCTCCTCCGTCTACCATGAGGGGAAGTCTCT | 1972 |
| 7743-L5-1 | 20q12 | AAGGCAGGTCGAACTGGAGCTGGCTGGGGAGCTCATTAGCACCTCGCCAGAGCCGAGGGCTGCCTGCCTT | 1973 |
| 7781-R5-2 | 17q12 | AGCCTGTTCCGTGCTCGCTAACTATAAACTATCTGATTTATATTCATTAACCAGTACTAGACAGCGGCAGGCACAGGCT | 1974 |
| 7824-R5-1 | 6q16.2 | CCTGGATGCTGTTTCATTATGTAGAGTCAGGCAAAAGACAGACGGATGTGTGTGTGAGGCGGCGATGAAGCTGGCACCAGG | 1975 |
| 7846-L5-2 | 17q12 | GCCCTGGCAGGGCTGGTGGAAGGGATGGGATGGAGGAGGACTCACTTCCCAGCCTCTGCCTTCCCCTTCCTCCCTCCCTCCCCT | 1976 |
| | | GGGC | |
| 7883-R5-1 | 11q14.2 | CTCTCCGTGCTTCTCGGCCCGCCGCCCTTCCTGTCTCGGGGACACGGTTTCTAAATAAGGTTGGGAGGGTGAGAGGGCGGGAGG | 1977 |
| | | GGAGAG | |
| 78-R4-1 | 1q21.3 | CCAAATTGAGAGCTCAAGGACTACAACTCCCAGTGTGCACCACAATTGCTTTGTATGTACCTTGGGAGTTGTAGTCCCCCTTGAGAA | 1978 |
| | | GCTCTGG | |
| 7949-R5-1 | 5q31.3 | GGTGCGCGCGGTGGACGCCGATTCGGGCTACAATGCGTGGCTTTCGTATGAATTGCAGCTGGCGGCGGTCGGCGCGCGCATC | 1979 |
| 7971-L5-1 | 9q31.3 | AGCCTGCACCCAGGGAGCGGCAGGGGAGTGACACAGTGAGTCACAGACCACAACAAAGCCCTTCCTGGCATGTCGGGCT | 1980 |
| 8016-L3-1 | 12q21.1 | AGAGGGGTGACTGCGGGGCTTGTTGCGCTGAAGATTTACAATGTACTTCTTGCAGGCGGCTCAGCAACCCCCTCT | 1981 |
| 8062-R5-1 | 11q23.2 | GGGCAGGCGTCCTGCGGGCTCCAGGCTTCTCTGCCACAGCTGGCGGAGGTGCTTAAGGCCTTGGACCCCGTGACCTTTGCCC | 1982 |
| 8077-R3-1 | Xq22.3 | CCAATTCTCACTTAGGTGTTAGGGATTTAATGATACTCCTCTGAAGAGTATTTTTACTACCTGAGGGTGGGGAATGG | 1983 |
| 8089-L5-1 | 4p16.2 | GGGAGGGGGTGGCCCTGAGCTTATAAGGGTCTCTAAGAGCCAGGAGACAGTCAGCCTGGCTACCTCTAATCTC | 1984 |
| 8239-R5-1 | Xp21.2 | TGACTTTTCATCCCCTTCACACCCTCTGCATTTCCCTTTTGGAGAGCTCAGAGGGAGGTGAAGTGGGAAGAAAATCA | 1985 |
| 8250-R5-2 | 9p11.2 | CGGAGCCGCCCGCGCCAGCCTCTCCATCTCGCAAGTTTTAATTAACGCTGAGGGAGAGGCGGCTGACGGGCGGGTCGG | 1986 |
| 8281-L5-2 | 11q13.4 | CCAGCCCTCAGCTGCAGCTGGGGAGGGGCTGAAGGGTAGGGAGCCCTATCCCACCTGCATCAGAGGCCTGG | 1987 |
| 8298-R5-1 | 22q13.1 | GATGCCGGGCGCCCGCCGCAGCCGCTGCCGCCGGAGCCCGGGATGGGGCGAGAGGCTGCGGCGGACGCCAGCATC | 1988 |
| 8329-L5-1 | 1p34.2 | GAGCTGACCCAGGGTGGGCGTTTGGAAGGACTCAGCCTCCGTCCTGCCTGGTGCTGGGATCAGCTT | 1989 |
| 8336-R5-2 | Xq13.1 | CCTCCCCAAGCAATCTGCTCACCCACTTGTTGTCATGGTGACTCTGGCTGGGGGTGTGGGGACTGAGTGGGGAGG | 1990 |
| 8394-L5-2 | 7p13 | GGGGCCAGGGATAGTCGGAGATGGGCAGGGCGGGGGCCCCACTGGCGAGGGGCCCTCGGCTTCTGGGGTCCCTGAGCCCC | 1991 |
| 8564-L5-1 | 5q13.2 | AGGGGGTGGGAGGTCTGTTTGGCAACTGGGGTGAAGGGATTGCCCTTCCCCTGCTGGGATTCCCCCAGCCCCT | 1992 |
| 8564-R5-2 | 5q13.2 | AGGGGGTGGGAGGTCTGTTTGGCAACTGGGGTGAAGGGATTGCCCTTCCCCTGCTGGGATTCCCCCAGCCCCT | 1993 |
| 8898-R5-1 | 17p13.3 | GGCGCTGTCGGCCGGGGCGGCCGCCGGCAACTCGTCCGTCTTGATAACCATGGTGGCGGGAGCGGGCGTCCGCCTCGGCTGTC | 1994 |
| | | CGCGCC | |
| 9021-L5-2 | 10q23.1 | GATGGTGTGGGGAGCTTGGGTGTTTGTTTCCCATTTCACAAAACAAAGCAGCCAACCTTACATTCATC | 1995 |
| 9068-R5-2 | 14q24.3 | GTCTGCCTCTTTCTCTGCAGTAATTGCTTCCTGACATTTGTTTATTTTAATTAGGAGAGCAGTCTTGATCAAGAGGGAGGGCAGAC | 1996 |
| 9087-L5-2 | 3p14.1 | AGGAAGGGAATGGACTGGGAGGGTTTCTTTTCCTGATGGAAAGCCTATTTTTCTTATTGTGTTCCTTTTCT | 1997 |
| 9134-R5-1 | 8q24.3 | GCTGCTTTGGGGGTTTTCCGCCCTTCCGCGCGGCTGCAGCTCCCCACGGCAGCCCCGCAACCAGGCGGATAACCCTTTCCTCGGC | 1998 |
| 9217-L3-2 | 2q31.2 | TCCACTGTTGGCTTTAGTCACGGCGGGGATCGTCAGTTTAGCGCGGCCATCGCTAAAGGAGATCTGCACGCCGGGCAGAGTGGAA | 1999 |
| | | GTGGA | |
| 9245-R5-1 | 5q21.1 | AGCCTAAATACATTAGCGAGCTGGTAAAGCTTTTAAGGCCTTCTTGGGAGCGAGTGGCTGGCTAATGAGAGGTT | 2000 |
| 9287-L5-2 | 17q21.1 | TGCATGTGTGGGCTGGGGAGGGCTCTGAATATCTCCTGGAACGGTACCCAGAGCCCTGTGGCTCTGCGCATGCG | 2001 |
| 9369-L5-1 | Xq26.3 | TCCCCTGATTTCCCTCTGTGGAAGAATGTGTGAATTCACATGCATCCTGTCCTAACTGTGCAGGGGAAAATTCCAGTCAGGGGA | 2002 |
| 9384-R5-2 | 16q22.3 | AAACCAGTTAGTCAATTCGTTCAGGTCCCTAAGTGGCGATTTGTGGTAATGTCTACATCAATACGGACGGAGCGGTTTGCTAGCTG | 2003 |
| | | GTTT | |
| 9387-R2-2 | 3p21.1 | TCTCCATCCTCTGTCTCCCTTGATCCTCTGTTCTCCCTGATGGCTTTGAGATGAAGGCGACGGCAAGGATGGAGG | 2004 |
| 9564-R5-2 | 9q33.2 | GGCGCCCGCCGGGCTGTCCGGAGCGGCCGATGGGGCCCGTGTGAGCGCGCCCAGGCCCGGCCCGGTGCCCGGCGGGCGGC | 2005 |
| 9605-R5-1 | Xp11.4 | GTTCTCCTTGGAACTCAGAGCACATAGTGACTCCTTTTTCCTTTTGTGGTCAGGAAATGAGTTTTGCTCTGTTTTTCACTTGGGGGC | 2006 |
| 9691-L5-1 | 14q24.3 | GCAAGGGGCCAAGAGGGAGATGCGGATGAAATGGATGATTTAATGGGTCATCTCTCCTGTAGTTAATTTCTCTAGATCTCTTGT | 2007 |
| 9770-R5-2 | 17q21.2 | CACCTGTCATTCTGCAGCCCCCTCCCTAGCAAGCTCCAGTTATAGGGCTGGGGTTGGCAACAGGTG | 2008 |
| 9774-R2-2 | 13q13.3 | GCTTGTCCTAAAAGATCTTCCTTCTGTTTCCCTGGGTTTATCCACTTGGTTGGCCTGATGGGAGCAGGAGGCGGTGAGGGGGCGG | 2009 |
| | | GC | |
| 9812-L3-1 | 5p13.3 | AGCAAGCTGGGGAGCCCAGATAAATAGAGCTTTCTGTTTCCTTTCCTGGAGTCTAAAATATCTGATCTGGAGGTTCCCTCCCTGCT | 2010 |
| 9866-L5-1 | 11q13.1 | GGGCTGGGGCTGGCAATGGAGCCCCTCTCCTAGCCTCCTCCATGGGGACTGGGGCTCCAGGGGCCCCATCCTGCTCAGCCTCCC | 2011 |
| 999997-R4-1 | 17q25.3 | TCTTCCTCCACCCTGCCCCACCCCTAGGTCTCTTTATTGATTCAAAGGTTAAGGAAGCTCCTGGGGGCTTGAGGGGGTGGCACAGT | 2012 |
| | | TTTGGTGGGGCCCAGTGAGGA | |
| let-7b | 22q13.31 | CGGGGTGAGGTAGTAGGTTGTGTGGTTTCAGGGCAGTGATGTTGCCCCTCGGAAGATAACTATACAACCTACTGCCTTCCCTG | 2013 |
| let-7c | 21q21.1 | GCATCCGGGTTGAGGTAGTAGGTTGTATGGTTTAGAGTTACACCCTGGGAGTTAACTGTACAACCTTCTAGCTTTCCTTGGAGC | 2014 |
| let-7e | 19q13.33 | CCCGGGCTGAGGTAGGAGGTTGTATAGTTGAGGAGGACACCCAAGGAGATCACTATACGGCCTCCTAGCTTTCCCCAGG | 2015 |
| miR-100 | 11q24.1 | CCTGTTGCCACAAACCCGTAGATCCGAACTTGTGGTATTAGTCCGCACAAGCTTGTATCTATAGGTATGTGTCTGTTAGG | 2016 |
| miR-101 | 9p24.1 | ACTGTCCTTTTTCGGTTATCATGGTACCGATGCTGTATATCTGAAAGGTACAGTACTGTGATAACTGAAGAATGGTGGT | 2017 |
| miR-101 | 1p31.3 | TGCCCTGGCTCAGTTATCACAGTGCTGATGCTGTCTATTCTAAAGGTACAGTACTGTGATAACTGAAGGATGGCA | 2018 |
| miR-1182 | 1q42.2 | GGGACTTGTCACTGCCTGTCTCCTCCCTCTCCAGCAGCGACTGGATTCTGGAGTCCATCTAGAGGGTCTTGGGAGGGATGTGACT | 2019 |
| | | GTTGGGAAGCCC | |
| miR-1207-5p | 8q24.21 | GCAGGGCTGGCAGGGAGGCTGGGAGGGGCTGGCTGGGTCTGGTAGTGGGCATCAGCTGGCCCTCATTTCTTAAGACAGCACTTC | 2020 |
| | | TGT | |
| miR-1224-5p | 3q27.1 | GTGAGGACTCGGGAGGTGGAGGGTGGTGCCGCCGGGGCCGGGCGCTGTTTCAGCTCGCTTCTCCCCCCACCTCCTCTCTCCTCAG | 2021 |
| miR-1225-5p | 16p13.3 | GTGGGTACGGCCCAGTGGGGGGGAGAGGGACACGCCCTGGGCTCTGCCCAGGGTGCAGCCGGACTGACTGAGCCCCTGTGCC | 2022 |
| | | GCCCCCAG | |
| miR-1228* | 12q13.3 | GTGGGCGGGGGCAGGTGTGTGGTGGGTGGTGGCCTGCGGTGAGCAGGGCCCTCACACCTGCCTCGCCCCCCAG | 2023 |
| miR-1234 | 8q24.3 | GTGAGTGTGGGGTGGCTGGGGGGGGGGGGGGGGGGCCGGGGACGGCTTGGGCCTGCCTAGTCGGCCTGACCACCCACCCCAC | 2024 |
| | | AG | |
| miR-125a-5p | 19q13.33 | TGCCAGTCTCTAGGTCCCTGAGACCCTTTAACCTGTGAGGACATCCAGGGTCACAGGTGAGGTTCTTGGGAGCCTGGCGTCTGGCC | 2025 |
| miR-126 | 9q34.3 | CGCTGGCGACGGGACATTATTACTTTTGGTACGCGCTGTGACACTTCAAACTCGTACCGTGAGTAATAATGCGCCGTCCACGGCA | 2026 |
| miR-1268 | 15q11.2 | TAGCCGGGCGTGGTGGTGGGGGCCTGTGGTCCCAGCTACTTTGGAGGCTGAG | 2027 |
| miR-130b | 22q11.21 | GGCCTGCCCGACACTCTTTCCCTGTTGCACTACTATAGGCCGCTGGGAAGCAGTGCAATGATGAAAGGGCATCGGTCAGGTC | 2028 |
| miR-140-3p | 16q22.1 | TGTGTCTCTCTCTGTGTCCTGCCAGTGGTTTTACCCTATGGTAGGTTACGTCATGCTGTTCTACCACAGGGTAGAACCACGGACAG | 2029 |
| | | GATACCGGGGCACC | |
| miR-145 | 5q33.1 | CACCTTGTCCTCACGGTCCAGTTTTCCCAGGAATCCCTTAGATGCTAAGATGGGGATTCCTGGAAATACTGTTCTTGAGGTCATGGTT | 2030 |
| miR-149* | 2q37.3 | GCCGGCGCCCGAGCTCTGGCTCCGTGTCTTCACTCCCGTGCTTGTCCGAGGAGGGAGGGAGGGACGGGGGCTGTGCTGGGGCA | 2031 |
| | | GCTGGA | |
| miR-150 | 19q13.33 | CTCCCCATGGCCCTGTCTCCCAACCCTTGTACCAGTGCTGGGCTCAGACCCTGGTACAGGCCTGGGGGACAGGGACCTGGGGAC | 2032 |
| miR-181b | 9q33.3 | CTGATGGCTGCACTCAACATTCATTGCTGTCGGTGGGTTTGAGTCTGAATCAACTCACTGATCAATGAATGCAAACTGCGGACCAAA | 2033 |
| | | CA | |
| miR-181b | 1q31.3 | CCTGTGCAGAGATTATTTTTTAAAAGGTCACAATCAACATTCATTGCTGTCGGTGGGTTGAACTGTGTGGACAAGCTCACTGAACAA | 2034 |
| | | TGAATGCAACTGTGGCCCCGCTT | |
| miR-181d | 19p13.12 | GTCCCCTCCCCTAGGCCACAGCCGAGGTCACAATCAACATTCATTGTTGTCGGTGGGTTGTGAGGACTGAGGCCAGACCCACCGG | 2035 |
| | | GGGATGAATGTCACTGTGGCTGGGCCAGACACGGCTTAAGGGGAATGGGGAC | |
| miR-185* | 22q11.21 | AGGGGGCGAGGGATTGGAGAGAAAGGCAGTTCCTGATGGTCCCCTCCCCAGGGGCTGGCTTTCCTCTGGTCCTTCCCTCCCA | 2036 |
| miR-214 | 1q24.3 | GGCCTGGCTGGACAGAGTTGTCATGTGTCTGCCTGTCTACACTTGCTGTGCAGAACATCCGCTCACCTGTACAGCAGGCACAGAC | 2037 |
| | | AGGCAGTCACATGACAACCCAGCCT | |
| miR-23a* | 19p13.12 | GGCCGGCTGGGGTTCCTGGGGATGGGATTTGCTTCCTGTCACAAATCACATTGCCAGGGATTTCCAACCGACC | 2038 |
| miR-30a | 6q13 | GCGACTGTAAACATCCTCGACTGGAAGCTGTGAAGCCACAGATGGGCTTTCAGTCGGATGTTTGCAGCTGC | 2039 |
| miR-30d | 8q24.22 | GTTGTTGTAAACATCCCCGACTGGAAGCTGTAAGACACAGCTAAGCTTTCAGTCAGATGTTTGCTGCTAC | 2040 |
| miR-320a | 8p21.3 | GCTTCGCTCCCCTCCGCCTTCTCTTCCCGGTTCTTCCCGGAGTCGGGAAAAGCTGGGTTGAGAGGGCGAAAAAGGATGAGGT | 2041 |
| miR-320b | 1q42.11 | TGTTATTTTTTGTCTTCTACCTAAGAATTCTGTCTCTTAGGCTTTCTCTTCCCAGATTTCCCAAAGTTGGGAAAAGCTGGGTTGAGAG | 2042 |
| | | GGCAAAAGGAAAAAAAAAGAATTCTGTCTCTGACATAATTAGATAGGGAA | |
| miR-320b | 1p13.1 | AATTAATCCCTCTCTTTCTAGTTCTTCCTAGAGTGAGGAAAAGCTGGGTTGAGAGGGCAAACAAATTAACTAATTAATT | 2043 |
| miR-335 | 7q32.2 | TGTTTTGAGCGGGGGTCAAGAGCAATAACGAAAAATGTTTGTCATAAACCGTTTTTCATTATTGCTCCTGACCTCCTCTCATTTGCTA | 2044 |
| | | TATTCA | |
| miR-34a | 1p36.23 | GGCCAGCTGTGAGTGTTTCTTTGGCAGTGTCTTAGCTGGTTGTTGTGAGCAATAGTAAGGAAGCAATCAGCAAGTATACTGCCCTA | 2045 |
| | | GAAGTGCTGCACGTTGTGGGGCCC | |
| miR-34b* | 11q23.1 | GTGCTCGGTTTGTAGGCAGTGTCATTAGCTGATTGTACTGTGGTGGTTACAATCACTAACTCCACTGCCATCAAAACAAGGCAC | 2046 |
| miR-34c-5p | 11q23.1 | AGTCTAGTTACTAGGCAGTGTAGTTAGCTGATTGCTAATAGTACCAATCACTAACCACACGGCCAGGTAAAAAGATT | 2047 |
| miR-371-5p | 19q13.41 | GTGGCACTCAAACTGTGGGGGCACTTTCTGCTCTCTGGTGAAAGTGCCGCCATCTTTTGAGTGTTAC | 2048 |
| miR-373* | 19q13.41 | GGGATACTCAAAATGGGGGCGCTTTCCTTTTTGTCTGTACTGGGAAGTGCTTCGATTTTGGGGTGTCCC | 2049 |
| miR-451 | 17q11.2 | CTTGGGAATGGCAAGGAAACCGTTACCATTACTGAGTTTAGTAATGGTAATGGTTCTCTTGCTATACCCAGA | 2050 |
| miR-486-3p | 8p11.21 | GCATCCTGTACTGAGCTGCCCCGAGGCCCTTCATGCTGCCCAGCTCGGGGCAGCTCAGTACAGGATAC | 2051 |
| miR-491-3p | 9p21.3 | TTGACTTAGCTGGGTAGTGGGGAACCCTTCCATGAGGAGTAGAACACTCCTTATGCAAGATTCCCTTCTACCTGGCTGGGTTGG | 2052 |
| miR-498 | 19q13.41 | AACCCTCCTTGGGAAGTGAAGCTCAGGCTGTGATTTCAAGCCAGGGGGCGTTTTTCTATAACTGGATGAAAAGCACCTCCAGAGCT | 2053 |
| | | TGAAGCTCACAGTTTGAGAGCAATCGTCTAAGGAAGTT | |
| miR-557 | 1q24.2 | AGAATGGGCAAATGAACAGTAAATTTGGAGGCCTGGGGCCCTCCCTGCTGCTGGAGAAGTGTTTGCACGGGTGGGCCTTGTCTTT | 2054 |
| | | GAAAGGAGGTGGA | |
| miR-638 | 19p13.2 | GTGAGCGGGCGCGGCAGGGATCGCGGGCGGGTGGCGGCCTAGGGCGCGGAGGGCGGACCGGGAATGGCGCGCCGTGCGCCG | 2055 |
| | | CCGGCGTAACTGCGGCGCT | |
| miR-663 | 20p11.1 | CCTTCCGGCGTCCCAGGCGGGGCGCCGCGGGACCGCCCTCGTGTCTGTGGCGGTGGGATCCCGCGGCCGTGTTTTCCTGGTGG | 2056 |
| | | CCCGGCCATG | |
| miR-671-5p | 7q36.1 | GCAGGTGAACTGGCAGGCCAGGAAGAGGAGGAAGCCCTGGAGGGGCTGGAGGTGATGGATGTTTTCCTCCGGTTCTCAGGGCTC | 2057 |
| | | CACCTCTTTCGGGCCGTAGAGCCAGGGCTGGTGC | |
| miR-744 | 17p12 | TTGGGCAAGGTGCGGGGCTAGGGCTAACAGCAGTCTTACTGAAGGTTTCCTGGAAACCACGCACATGCTGTTGCCACTAACCTCA | 2058 |
| | | ACCTTACTCGGTC | |
| miR-885-3p | 3p25.3 | CCGCACTCTCTCCATTACACTACCCTGCCTCTTCTCCATGAGAGGCAGCGGGGTGTAGTGGATAGAGCACGGGT | 2059 |
| miR-92a-2* | Xq26.2 | TCATCCCTGGGTGGGGATTTGTTGCATTACTTGTGTTCTATATAAAGTATTGCACTTGTCCCGGCCTGTGGAAGA | 2060 |
| miR-92b* | 1q22 | CGGGCCCCGGGCGGGCGGGAGGGACGGGACGCGGTGCAGTGTTGTTTTTTCCCCCGCCAATATTGCACTCGTCCCGGCCTCCG | 2061 |
| | | GCCCCCCCGGCCC | |
| miR-98 | Xp11.22 | AGGATTCTGCTCATGCCAGGGTGAGGTAGTAAGTTGTATTGTTGTGGGGTAGGGATATTAGGCCCCAATTAGAAGATAACTATACA | 2062 |
| | | ACTTACTACTTTCCCTGGTGTGTGGCATATTCA | |
| miR-99a | 21q21.1 | CCCATTGGCATAAACCCGTAGATCCGATCTTGTGGTGAAGTGGACCGCACAAGCTCGCTTCTATGGGTCTGTGTCAGTGTG | 2063 |

### 5.5 Example 5

### Analysis of Target RNA from Additional Lung Cancer Cell Lines

[0339] Total RNA was prepared from the eight cell lines (seven lung cancer cell lines and one normal lung cell line) listed in Table 26. Cell lines were purchased from LGC promochem (ATCC) and cultured according to ATCC guidelines.

TABLE 26
Normal lung and lung tumor cell lines

| Cell line | ATCC number | Cancer type |
|---|---|---|
| H520 | HTB-182 | squamous cell carcinoma |
| H69 | HTB-119 | small cell lung cancer |
| H146 | HTB-173 | small cell lung cancer |
| H23 | CRL-5800 | adenocarcinoma; non-small cell lung |
| | | cancer |
| NHBE | CC-2540 | normal Bronchial epithelial cells |
| H187 | CRL-5804 | small cell lung cancer |
| calu 1 | HTB-54 | epidermoid carcinoma |
| calu 3 | HTB-55 | anaplastic carcinoma |

[0340] Microarray data acquisition and analysis were conducted as described in Example 4.

[0341] Total RNA from normal bronchial epithelial cells (NHBE) was used as a control.

[0342] The microarray data was analyzed to identify target RNAs that were present at increased levels in at least four of the cell lines tested. Table 27 shows the target RNAs, the probe sequences used to detect the target RNAs, and the fold-increase in each of the cell lines, relative to NHBE cells.

[0343] The microarray data was further analyzed to identify target RNAs that were present at increased levels in two or three of the cell lines, but for which the average increase in the level of the target RNA relative to NHBE cells was at least 5-fold. Table 28 shows the target RNAs, the probe sequences used to detect the target RNAs, and the fold-change in each of the cell lines, relative to NHBE cells. Table 29 shows the pre-microRNA sequences and chromosomal location of the pre-microRNA gene for each of the target RNAs in Tables 27 and 28.

[0344] The microarray data was then analyzed to identify target RNAs that were present at least 5-fold decreased levels in at least four of the cell lines. Table 30 shows the target RNAs, the probe sequences used to detect the target RNAs, and the fold-change in each of the cell lines relative to NHBE cells. Table 30 also shows the number of cell lines in which the same target RNA is present at least 2-fold increased levels. Table 31 shows the pre-microRNA sequences and chromosomal location of the pre-microRNA gene for each of the target RNAs in Table 30.

TABLE 27
Target RNAs present at increased levels in at least four cell lines

| | | | | | | | | | |
|---|---|---|---|---|---|---|---|---|---|
| | | SEQ | | | | | | | |
| | | ID | Calu1 | calu3 | H146 | H187 | | H520 | |
| Gene | Probe sequence | NO | FC | FC | FC | FC | H23 FC | FC | H69 FC |

| | | | | | | | | | |
|---|---|---|---|---|---|---|---|---|---|
| 10083-L5-1 | CCCTCTTCCTTTCTACCCCCTCTCTCCACCC | 2064 | −1.00 | −1.00 | 6.68 | 2.01 | 4.16 | 4.70 | 19.19 |
| 10333-L5-1 | TGCCCTGCCCACCCCCTCCCCTGCCCCG | 2065 | −8.68 | −8.68 | 1.38 | 2.28 | 2.04 | 2.09 | 4.83 |
| 10398-R5-1 | TTGCTACCCGTTTCCCCTCCTCTTGAAGTTGCTT | 2066 | −1.00 | −1.00 | 3.24 | 1.35 | 20.09 | 10.86 | 13.61 |
| 13122-L5-1 | TTAGGAAATTCCATCTCACCTGCTCCAGTCC | 2067 | −1.77 | 1.01 | 4.68 | 1.44 | 4.33 | 3.39 | 84.80 |
| 13124-L5-1 | TCCTCCCCTCCGCGAAAGCCTAAACTTACCCCTCA | 2068 | −1.00 | −1.00 | 5.38 | −1.00 | 5.68 | 2.02 | 19.83 |
| 13163-R5-4 | ACCTCCCCTCCTTCTCTCCCTCCCACAAGACCAA | 2069 | −1.18 | −2.47 | 4.54 | 3.26 | 6.06 | 2.05 | 20.32 |
| 13185-L5-3 | TTCTGTTTTTTTTCTTCCCTCTCTCCCCTCTT | 2070 | −1.99 | −1.99 | 5.80 | 3.21 | 12.07 | 3.25 | 16.10 |
| 13195-L5-3 | TCTATATTCCCCCTCCATGACCATTTGTATTAG | 2071 | −1.00 | −1.00 | 2.03 | −1.00 | 23.44 | 12.07 | 6.32 |
| 13219-L5-1 | CTCTGACTCCCTCACTCAGTCTCTCTGCTCCAGC | 2072 | −1.00 | 1.77 | 7.06 | 2.04 | 9.36 | 3.89 | 89.50 |
| 13247-L5-2 | CTTCCCCTCCCGACCTCAGAGCCCTGTTCTTCCT | 2073 | −1.00 | −1.00 | 2.45 | 1.33 | 13.02 | 3.99 | 10.40 |
| 13334-L5-2 | AGGACTCCCCTCCCCTCCCACTGTGCCCTGTC | 2074 | −2.05 | −2.05 | 3.45 | −1.05 | 7.61 | 2.31 | 8.48 |
| 13335-L5-3 | ACCTCAGCCTCCACTGCCCTCCTGCCGCATCCTAT | 2075 | −2.19 | −2.19 | 4.64 | 5.53 | 2.19 | −1.17 | 7.44 |
| 25-R5-2 | TTCTGCTTTCCCAGAGCCTCACCCCCTCTTTT | 2076 | −1.00 | −1.00 | 3.62 | −1.00 | 2.55 | 2.18 | 4.29 |
| 266-R5-2 | GTCGCCCCCTCCCCCAAGTTGAGACTTGCA | 2077 | −2.31 | −2.31 | 3.23 | 1.50 | 9.97 | 5.43 | 10.49 |
| 3249-L5-1 | GCCGCCATCCCCGGAGCCGCCGCCGCCGCCGCC | 2078 | 1.78 | 1.99 | 3.86 | 81.53 | 5.02 | 2.61 | 69.65 |
| 3371-L5-2 | CTTTCCTTTCCTCCCCTCCACACCCCATGACTCCC | 2079 | −1.00 | −1.00 | 4.01 | 1.42 | 12.35 | 5.21 | 16.88 |
| 3744-R5-1 | CTTCTCCTTCCTCCCTGCTCCCCTCCCACTAATGCCAAAT | 2080 | −2.39 | 5.28 | 7.66 | 12.05 | 14.66 | 5.31 | 107.49 |
| 4855-R5-1 | CGGGTCTCCCGCTTCCCCCTCCTGCTCCAAGG | 2081 | −5.66 | −8.69 | 3.89 | 3.18 | 3.61 | 2.49 | 9.85 |
| 5107-L5-1 | AACTCCCCTTTGACCCCCCAGTACAAACTG | 2082 | −1.00 | −1.00 | 5.89 | −1.00 | 6.60 | 3.56 | 35.94 |
| 6235-R5-2 | TCTGCTCCAAAAATCCATTTAATATATTGT | 2083 | −1.00 | 1.77 | 10.45 | 7.18 | 13.80 | 16.55 | 207.50 |
| 6474-L5-1 | CCCTAATTAAAGCCATCCCCTCTTCCCCCTTCACC | 2084 | −1.00 | −1.00 | 7.06 | 2.24 | 8.81 | 2.57 | 8.35 |
| 6490-R5-3 | CCCCATCCCCCATATGACGCTTCCCCCTCCTAAC | 2085 | −2.09 | −2.09 | 2.58 | −2.09 | 9.85 | 6.98 | 8.49 |
| 6681-R2-1 | CCTGTTTTCTCCCCTCTCTCTCTGCCCCTCC | 2086 | −2.21 | −2.21 | 4.83 | 2.74 | 6.51 | 4.82 | 19.47 |
| 7572-R5-2 | ATCACCCTTCCCCCTCCCAAATAAAGCCAAA | 2087 | 1.39 | −1.00 | 7.08 | 4.90 | 27.15 | 15.82 | 29.39 |
| 7883-R5-1 | CTCTCCCCTCCCGCCCTCTCACCCTCCCAACCTTATTTAGA | 2088 | −4.54 | −2.60 | 2.34 | 3.18 | 3.80 | 1.61 | 6.57 |
| | AAC | | | | | | | | |
| 8004-R3-2 | GGAACTGCTTCTCCTTGCTCCAGTCATTGAAG | 2089 | −1.00 | 2.87 | 4.28 | 1.99 | 9.46 | 6.50 | 113.48 |
| 836-R4-1 | AAATAATCATTCCAAATGGTTCTCCCTGCTATGATTCAC | 2090 | −1.00 | −1.00 | 3.82 | −1.00 | 2.16 | 2.67 | 104.03 |
| 9594-R5-1 | ACTTAGACTTCCTTCCCACTCCCTGCATCCT | 2091 | −1.81 | 1.65 | 3.62 | 1.98 | 6.80 | 5.25 | 59.46 |
| let-7c | AACCATACAACCTACTACCTCA | 2092 | 3.65 | 24.65 | 2.65 | 1.35 | 3.24 | 5.11 | 15.37 |
| let-7d | AACTATGCAACCTACTACCTCT | 2093 | 2.02 | 13.30 | 1.78 | −1.94 | 1.37 | 4.41 | 8.00 |
| miR-103 | TCATAGCCCTGTACAATGCTGCT | 2094 | −1.00 | −1.00 | 2.97 | 3.07 | 1.27 | 3.15 | 3.05 |
| miR-106a | CTACCTGCACTGTAAGCACTTTT | 2095 | −1.00 | −1.00 | 13.51 | 23.92 | 4.32 | 6.14 | 17.48 |
| miR-107 | TGATAGCCCTGTACAATGCTGCT | 2096 | −1.00 | 1.59 | 4.64 | 2.94 | 1.85 | 7.68 | 8.76 |
| miR-16 | CGCCAATATTTACGTGCTGCTA | 2097 | −1.00 | 1.78 | 6.76 | 13.51 | 3.05 | 1.91 | 2.91 |
| miR-17 | CTACCTGCACTGTAAGCACTTTG | 2098 | −1.00 | −1.00 | 13.68 | 23.68 | 3.51 | 8.86 | 18.29 |
| miR-200b | TCATCATTACCAGGCAGTATTA | 2099 | −1.00 | 6.04 | 6.46 | 36.53 | −1.00 | 7.67 | 2.72 |
| miR-200c | TCCATCATTACCCGGCAGTATTA | 2100 | −3.97 | 5.00 | 4.38 | 7.25 | −3.97 | 1.02 | 2.02 |
| miR-20a | CTACCTGCACTATAAGCACTTTA | 2101 | 512.00 | −1.00 | 6.67 | 5.00 | 1.25 | 2.43 | 5.02 |
| miR-20b | CTACCTGCACTATGAGCACTTTG | 2102 | −1.00 | −1.00 | 15.49 | 7.38 | 1.90 | 2.68 | 8.04 |
| miR-298 | TGGGAGAACCTCCCTGCTTCTGCT | 2103 | −1.00 | −1.00 | 4.26 | −1.00 | 3.08 | 2.00 | 49.37 |
| miR-320a | TCGCCCTCTCAACCCAGCTTTT | 2104 | −1.00 | −1.00 | 5.63 | 6.24 | 4.27 | −1.00 | 9.68 |
| miR-320b | TTGCCCTCTCAACCCAGCTTTT | 2105 | −1.00 | −1.00 | 3.91 | 3.97 | 3.28 | −1.00 | 3.98 |
| miR-320d | TCCTCTCAACCCAGCTTTT | 2106 | −1.00 | −1.00 | 2.33 | 2.66 | 2.54 | −1.00 | 3.22 |

TABLE 28

target RNAs present at increased levels in two or three cell lines, but with
an average increase of at least 5-fold relative to normal levels

| | | | | | | | | | |
|---|---|---|---|---|---|---|---|---|---|
| | | SEQ | | | | | | | |
| | | ID | Calu1 | calu3 | H146 | H187 | H23 | H520 | H69 |
| Gene | Probe sequence | NO | FC | FC | FC | FC | FC | FC | FC |

| | | | | | | | | | |
|---|---|---|---|---|---|---|---|---|---|
| 10233-R5-1 | ACCCTCTCCCCTTGGATCTGGAGCAGCAGGCAGTAGA | 2107 | −2.04 | −2.04 | 3.75 | 1.08 | −1.08 | −2.04 | 10.41 |
| 10335-L5-2 | CCACTCCCCTCCTTTTTAATTAGAAAGCAC | 2108 | −1.00 | −1.00 | 2.43 | −1.00 | 2.56 | 1.35 | 12.59 |
| 12184-L4-1 | GACCTCAGCGTGCCCCCTTTCAACCACAGACGAATATTGTG | 2109 | −1.98 | −1.98 | 2.91 | −1.03 | −1.63 | −1.51 | 9.45 |
| | TACAA | | | | | | | | |
| 12223-L5-1 | GACATCAGACAGAGTTGTTTCTTCTCCCTCTA | 2110 | −4.85 | −4.85 | 2.43 | −1.45 | −4.85 | −3.28 | 7.69 |
| 12695-R5-2 | CCCCCACCAAACCTATTCCCGCATCCTCCCCGG | 2111 | −2.87 | −2.87 | 2.64 | 1.50 | −1.43 | −2.87 | 7.70 |
| 12721-R5-2 | TCCACTCTGACCAGCTCACCCTCACTGGACTA | 2112 | −1.00 | −1.00 | 2.69 | −1.00 | −1.00 | −1.00 | 19.11 |
| 12729-R5-1 | CGACGAAAATGCAATTGTGTGCCTTCTCCCTCC | 2113 | −1.00 | −1.00 | 2.17 | −1.00 | −1.00 | −1.00 | 16.72 |
| 12888-L5-2 | TTTCCTACATTGTATGGTTCTCCCAGCTCCT | 2114 | −1.00 | −1.00 | 1.29 | −1.00 | 2.69 | 1.51 | 85.37 |
| 12911-L5-1 | CAACTGACACCTCCTTCCTTTTCCTCCTTCGT | 2115 | −1.00 | −1.00 | 7.10 | 2.04 | −1.00 | −1.00 | 10.36 |
| 12917-R5-2 | GGACCTATGGGCCCTTCCCTTCCCCCAACATTG | 2116 | −1.00 | −1.00 | 4.25 | −1.00 | 2.62 | −1.00 | 10.54 |
| 12947-R5-3 | GCCCCCTCCATAGAGAGAGGCCCCAGGGGAGTGA | 2117 | −1.00 | −1.00 | 1.37 | −1.00 | −1.00 | 4.78 | 8.65 |
| 12992-L5-1 | CATACCTGCTTCCCTCCACCCCCATCTCTA | 2118 | −1.00 | −1.00 | 5.12 | 1.36 | 1.24 | −1.00 | 10.93 |
| 13001-L5-1 | TTCCTAGATACCACTCCCAGCTCCA | 2119 | −1.00 | −1.00 | 2.06 | −1.00 | 1.28 | 2.46 | 11.10 |
| 13070-R5-3 | CTGTCTCCTCTCCCCAGTCCAAAGGACCTAATGC | 2120 | −1.00 | −1.00 | 5.17 | 1.43 | 1.89 | −1.00 | 13.57 |
| 13115-L5-3 | ACCCCCTCCAGGGCCGACCACCCCAACCCAAAC | 2121 | −1.00 | −1.00 | 1.59 | −1.00 | 10.07 | 13.09 | 12.60 |
| 13124-L5-2 | GCTCCATGTCTCCTCCCCTCCGCGAAAGCCTAAAC | 2122 | −2.76 | −2.76 | 4.56 | −1.18 | 7.69 | −1.73 | 20.66 |
| 13195-L5-2 | CCCCCTCCATGACCATTTGTATTAGTATCTTTT | 2123 | −1.00 | −1.00 | −1.00 | −1.00 | 12.25 | 13.17 | 10.79 |
| 13237-L5-4 | ACCCCCTCCAGGGCCGACCACCCCAACCCAAACAA | 2124 | −1.00 | −1.00 | 1.35 | −1.00 | 8.49 | 13.59 | 14.13 |
| 13274-L5-3 | CCTTCTCTTCTCCCGTGCTCCCACCCTCCCTCAGGG | 2125 | −4.16 | −3.37 | 1.81 | 1.66 | 3.05 | 2.03 | 18.48 |
| 13278-R5-2 | TCAGACTGTGCTCTCTCCATTCCCCAGGACTCC | 2126 | −1.00 | −1.00 | 4.29 | 1.86 | −1.00 | −1.00 | 22.61 |
| 13287-L5-4 | ACTGCAGAGGAGCCACCCCACCCTCCTCCCAAG | 2127 | −1.00 | −1.00 | 4.08 | −1.00 | 4.47 | −1.00 | 8.90 |
| 13343-L5-4 | CTCCCGGCCCCTCACCCTTCCCTGGGCCCTCCACCC | 2128 | −1.00 | −1.00 | 4.67 | 1.44 | −1.00 | 1.34 | 10.16 |
| 13357-L5-4 | AGCGGACCTTCTCCCCACACCTCCCTGCAGCCTC | 2129 | −2.19 | −2.19 | 3.44 | 1.44 | −1.81 | −2.19 | 15.06 |
| 13358-L5-2 | CCTCCTCACCACCCCCTCCACACTCCTGGGGAAGT | 2130 | −1.00 | −1.00 | 1.41 | −1.00 | 5.44 | 10.83 | 5.16 |
| 13366-R5-3 | CAGGCCTCACCCCAGTGCCCTCTCCTATTCCCAC | 2131 | −1.00 | −1.00 | 2.14 | 1.46 | −1.00 | −1.00 | 19.41 |
| 13395-R5-2 | CGTCAGACTGTGCTCTCTCCATTCCCCAGGACTC | 2132 | −1.00 | −1.00 | 4.13 | −1.00 | −1.00 | −1.00 | 25.57 |
| 13403-L5-2 | CCCGTGTCCCCCCAACCTGGGGCCAGGCCCA | 2133 | −1.00 | −1.00 | 1.56 | −1.00 | 4.85 | 1.85 | 9.80 |
| 13467-L5-1 | GTGACAGTCAGACCCTCCTTGCTCCAAGTCAAA | 2134 | −1.00 | −1.00 | 2.40 | 1.94 | 9.75 | −1.00 | 105.32 |
| 13470-R5-1 | TCCCACCCTCTCCACCTCAGGGACCAGAATCCT | 2135 | −1.00 | −1.00 | 5.33 | 1.97 | −1.00 | −1.00 | 12.11 |
| 13472-L5-1 | CTCAGAGCACTGTGTGTGACGTCCTCCTGTCTGTC | 2136 | 9.44 | 30.30 | −1.00 | −1.00 | −1.00 | −1.00 | −1.00 |
| 13508-L5-3 | GACAGGCTGCTCTCCTTCTGCTCTTAGCTTCCT | 2137 | −1.00 | −1.00 | 2.96 | −1.00 | −1.00 | −1.00 | 18.27 |
| 13530-L5-3 | CCTTCCTCCTTCCCCTGGGTCCCCCTAAGTTCTCC | 2138 | −1.00 | −1.00 | 8.37 | 5.70 | 1.56 | 1.34 | 16.94 |
| 13546-R5-2 | TGCCTCCACCCTCTCCATCCCGTCACCCTCCCA | 2139 | −2.75 | −2.75 | 3.08 | 6.44 | −1.36 | −2.04 | 8.01 |
| 3875-R5-2 | GACTGATTCAACCTCTCTCTCCCACTTTA | 2140 | −1.00 | −1.00 | 3.37 | 1.56 | −1.00 | −1.00 | 8.56 |
| 3923-R5-1 | TCACAAAGGATCTCCTTCATCCCTCTCCAG | 2141 | −1.00 | −1.00 | 1.18 | 3.17 | −1.00 | −1.00 | 8.48 |
| 5108-R5-2 | CCCTCTCCTCCCACACCGTCACTCACAATAACCC | 2142 | −1.94 | −1.94 | 4.49 | 1.77 | 1.53 | −1.94 | 12.32 |
| 5192-L3-2 | CATTTTTCCCCTTCCTTCCTCTATATCAGCAA | 2143 | −1.00 | −1.00 | 1.79 | −1.00 | 24.42 | 13.63 | 4.95 |
| 5306_B-R4-1 | TCCACTCTGACCAGCTCACCCTCACTGGACTATGACCCC | 2144 | −1.00 | −1.00 | 3.27 | −1.00 | −1.00 | −1.00 | 16.02 |
| 5633-L5-1 | CACTCCCTCCCTGGCTCCTGGAGACCCTCTCCAGGACTTG | 2145 | −1.00 | −1.00 | 2.22 | 2.39 | 1.27 | −1.00 | 45.28 |
| 5638-R5-2 | GGCCCTCCCCCTGCCTGTGATAGGCTG | 2146 | −1.57 | −2.40 | 3.23 | −1.15 | 5.85 | −1.33 | 8.54 |
| 5723-R5-1 | CCTCCTCCCCTTTCTCCAGCAGTAGCCTTCTTAA | 2147 | −1.00 | −1.00 | 4.87 | 1.40 | 3.97 | −1.00 | 11.99 |
| 5735-L5-1 | TGCTGTTTCCTCTGGCCTCAAGCCTGTGGGGG | 2148 | −1.00 | −1.00 | 1.18 | 3.00 | −1.00 | −1.00 | 14.30 |
| 6183-R5-1 | ACTTTTCTTAATGACTTTCCCCTCCTTAAG | 2149 | −1.00 | −1.00 | 1.75 | −1.00 | 18.55 | 12.12 | 10.01 |
| 6216-R5-1 | TACTCCCGCCGTTTACCCGTGCTTCATTGAA | 2150 | −3.03 | −3.03 | 2.63 | 13.19 | 1.06 | −3.03 | −1.10 |
| 6490-R5-3 | CCCCATCCCCCATATGACGCTTCCCCCTCCTAAC | 2151 | −3.21 | −4.42 | −2.06 | −1.29 | 5.92 | 3.87 | 5.51 |
| 6496-R5-2 | CCCCCTCCCCCACCCACCACTTCCCCTAGA | 2152 | −2.49 | −5.45 | 1.82 | −1.65 | 4.91 | −1.83 | 10.29 |
| 6584-L5-1 | GTCGGCCCTGCCTCCTCCTCCTCTCACCAAGC | 2153 | −1.00 | −1.00 | 3.33 | −1.00 | −1.00 | −1.00 | 12.02 |
| 6647-R5-1 | CCCCAGCTGGAGAATTTTTCCCCTCATTA | 2154 | −1.00 | −1.00 | −1.00 | −1.00 | 12.90 | 5.66 | 6.72 |
| 6752-R5-2 | CCCTCCTTTCCCCACCTCAGTCGGGCCACTGCT | 2155 | −1.00 | −1.00 | 2.70 | 1.92 | 5.08 | 1.27 | 9.54 |
| 6803-R5-2 | GCTCCCTCTCTGGTTGGACCTCACCCAAA | 2156 | −2.35 | −2.35 | 5.77 | 3.27 | −2.35 | −2.35 | 13.06 |
| 6930-R5-1 | TTAATCCTTCTCTCCCCTCTGATCTTGCAG | 2157 | −1.00 | −1.00 | 7.92 | 1.50 | 2.40 | −1.00 | 28.87 |
| 7113-R5-1 | CGCCTAATTAGCCCCCCTGCTCCGGAGGCCTCACC | 2158 | 1.06 | −2.16 | 2.60 | −2.16 | 1.12 | −1.18 | 12.56 |
| 7192-R5-1 | TTCCCCCTCTAAGTCTGCCTGGGCTCTTGGCACTG | 2159 | −1.00 | −1.00 | −1.00 | −1.00 | 5.96 | 13.37 | 21.66 |
| 7384-R3-1 | CTCGCAAAGGATCTCCTTCATCCCTCCCCA | 2160 | −1.00 | −1.00 | 1.30 | −1.00 | 2.58 | −1.00 | 9.23 |
| 7571-L5-1 | CAGGGCTAACAGGGCTCCCCCACCCCTAAG | 2161 | −2.26 | −2.26 | 4.35 | −2.26 | −1.81 | −2.26 | 6.92 |
| 836-R5-2 | AAATAATCATTCCAAATGGTTCTCCCTGCTAT | 2162 | −1.00 | −1.00 | 3.09 | −1.00 | 2.40 | 1.86 | 51.66 |
| 8433_C-R4-1 | AAACCAAAAAAAAAAAATTAAAAAGCGACGAAAATGCAATT | 2163 | −1.00 | −1.00 | 5.09 | −1.00 | −1.00 | −1.00 | 16.86 |
| | GTGTGCCTTCTCCCTCC | | | | | | | | |
| 8433-L3-1 | AAATGGCTCCTTTCCCCTTTCCCTCCACCG | 2164 | −1.00 | −1.00 | 6.04 | 1.95 | 5.50 | 1.32 | 11.98 |
| 8724-R5-2 | GGCCAAGCTTGGAACCTCTCCCTGCCAGCA | 2165 | −1.89 | −1.89 | 2.12 | 1.04 | −1.89 | −1.89 | 7.98 |
| 8808-R5-1 | GACCCCTTTCTCCCAGCCTGTTTCTGCAA | 2166 | −1.95 | −1.95 | 2.65 | 1.01 | −1.95 | −1.95 | 9.58 |
| 8832-R5-1 | TGGAGTACCACCTGTTTTTCCCCCACTT | 2167 | −1.00 | −1.00 | −1.00 | −1.00 | 5.05 | 1.41 | 21.96 |
| 9349-R5-2 | GAACACAGTGATGCAGAGGACTTCCTGCTCCA | 2168 | −1.00 | −1.00 | 1.84 | −1.00 | 1.99 | 1.61 | 85.75 |
| let-7b | AACCACACAACCTACTACCTCA | 2169 | −1.24 | 11.28 | 1.29 | 1.73 | −1.24 | 2.39 | 6.09 |
| let-7e | AACTATACAACCTCCTACCTCA | 2170 | −1.27 | 12.32 | 1.35 | −1.94 | 1.66 | 1.71 | 7.50 |
| miR-1268 | CCCCCACCACCACGCCCG | 2171 | −1.00 | −1.00 | 2.84 | −1.00 | −1.00 | 1.37 | 11.23 |
| miR-1274b | TGGCGCCCGAACAGGGA | 2172 | 6.00 | −1.00 | 9.59 | −1.00 | 1.21 | −1.00 | −1.00 |
| miR-15b | TGTAAACCATGATGTGCTGCTA | 2173 | −1.00 | −1.00 | 2.40 | 1.66 | −1.00 | 8.53 | −1.00 |
| miR-181a | ACTCACCGACAGCGTTGAATGTT | 2174 | −1.00 | 4.65 | 1.33 | −1.00 | 1.20 | −1.00 | 6.04 |
| miR-198 | GAACCTATCTCCCCTCTGGACC | 2175 | −1.00 | −1.00 | 3.07 | −1.00 | −1.00 | −1.00 | 17.81 |
| miR-222 | ACCCAGTAGCCAGATGTAGCT | 2176 | 2.68 | 9.77 | −1.96 | −1.96 | −1.00 | −1.96 | −1.96 |
| miR-26a | AGCCTATCCTGGATTACTTGAA | 2177 | −1.00 | 4.43 | 1.73 | 6.73 | 1.20 | −1.00 | 4.27 |
| miR-30d | CTTCCAGTCGGGGATGTTTACA | 2178 | −1.00 | 9.69 | 1.71 | 7.03 | −1.00 | −1.00 | −1.00 |
| miR-720 | TGGAGGCCCCAGCGAGA | 2179 | 5.56 | −1.00 | 4.48 | −1.00 | −1.00 | −1.00 | −1.00 |
| miR-92a | ACAGGCCGGGACAAGTGCAATA | 2180 | −1.00 | −1.00 | 3.74 | 10.88 | −1.00 | −1.00 | 7.26 |
| miR-92b* | CACTGCACCGCGTCCCGTCCCT | 2181 | −1.00 | −1.00 | 3.82 | 1.40 | −1.00 | −1.00 | 10.85 |
| miR-936 | CTGCGATTCCTCCCTCTACTGT | 2182 | −1.00 | −1.00 | 3.62 | 1.32 | 1.90 | 1.69 | 18.17 |
| miR-98 | AACAATACAACTTACTACCTCA | 2183 | −1.00 | 17.16 | 1.88 | −1.00 | −1.00 | 1.89 | 10.57 |

TABLE 29
Chromosomal locations and pre-microRNA sequences for target RNAs in Tables 27 and 28.

| Gene | Chrom. Loc'n | Pre-microRNA sequence | SEQ ID NO |
|---|---|---|---|
| 10083-L5-1 | 14q12 | GGGTGGAGAGAGGGGGTAGAAAGGAAGAGGGACATATGGGAGCCTCTTCCCCCATGCCCGAAAGCTTCTCCCATTT | 2184 |
| 10333-L5-1 | 11q12.2 | CGGGGCAGGGGAGGGGGTGGGCAGGGCACAAGCCTCCCACTGTGCCGTGTCCCCACCCTCCCCCGTTCCCCG | 2185 |
| 10398-R5-1 | Xq21.1 | TTGCTGAAGTTCTACCTTCTCACAAGGTTGCTAAAGTGAAGCAACTTCAAGAGGAGGGGAAACGGGTAGCAA | 2186 |
| 13122-L5-1 | 2p11.2 | GGACTGGAGCAGGTGAGATGGAATTTCCTAAAGGTCCAGATATTTAGGACCCTGGACCCATCTCACCCGCTGCCTCTGTCC | 2187 |
| 13124-L5-1 | 1q22 | TGAGGGGTAAGTTTAGGCTTTCGCGGAGGGGAGGAGACATGGAGCCTGGGAACTCCTTGTTCTCCCCTCTGCTGCCTCTCCCCACCCCTTA | 2188 |
| 13163-R5-4 | 19q13.32 | GCTGGGATCTCCGGGGTCTTGGTTCAGGGCCGGGGCCTCTGGGTTCCAAGCACCAGTGAGGAGAGTGCTGGGAGGGGAAGGGGTGGGAGG | 2189 |
| | | GCTTTGGTCTTGTGGGAGGGAGAGAAGGAGGGGAGGT | |
| 13185-L5-3 | 3q13.31 | GGGGAAGAAGAGCAAAGAGGGGAGAGAGGGAAGAAAAAAAACAGAATAAGTTGGTCGTATTGAAGCTTCTCCATCAACCCTAGAACAATTAGCTTCCACC | 2190 |
| 13195-L5-3 | 3p21.1 | AAAAAAAAAAAAGATACTAATACAAATGGTCATGGAGGGGGAATATAGAGAAGATCAATTTTGTACAGAAAAACCATTGGTTAGTATTTTTTTTTCTTTT | 2191 |
| 13219-L5-1 | 11q22.1 | GCTGGAGCAGAGAGACTGAGTGAGGGAGTCAGAGAGTTAAGAGAATTAGTACAGGTGAGATTGTACTGATTATCTTAACTCTCTGACCCCCTCA | 2192 |
| | | CTCAGTAAAGATCAGATTGTGCCAGGC | |
| 13247-L5-2 | 1q24.2 | ATCTCACAGAGGAAGAACAGGGCTCTGAGGTCGGGAGGGGAAGGCGGCTCAGGACTTCTGGCTCCAGAGCCTCCTCTCCTTCCACCATAGTG | 2193 |
| | | CCTGCTCCAGAGGAGAC | |
| 13334-L5-2 | 17q21.31 | TGGGGCAGACAGGGCACAGTGGGAGGGGAGGGGAGTCCTGCCAGGAGGGCCACCTGGTGACTCCACATCCTTTCTCACCCCCCAGA | 2194 |
| 13335-L5-3 | 17p13.2 | TGGCTGGGAGAGGAGCATAGGATGCGGCAGGAGGGCAGTGGAGGCTGAGGTACGGATTTCTAGGCCCGCCCTACCCTCCTCTCTGCCCCTAG | 2195 |
| | | TGCCCGTGGCCAA | |
| 25-R5-2 | 2q31.1 | TCCCGCAGCCGGTGACTGGAGCCCACCTCTGCAGAGACAAAGGTTAGAAAAAGAGGGGGTGAGGCTCTGGGAAAGCAGAATGCGGGG | 2196 |
| 266-R5-2 | 12q14.3 | GTTGCTATTTCCCTCAGTTGAGGGCGAAGTTAGCAAATCCGTAGCTGCAAGTCTCAACTTGGGGGAGGGGGCGAC | 2197 |
| 3249-L5-1 | 1q22 | GGCGGCGGCGGCGGCGGCTCCGGGGATGGCGGCGGCTCCGCTGCTGCTGCTGCTGCTGCTCGTGCCCGTGCCGCTGCTGCCGCTGCT | 2198 |
| 3371-L5-2 | 18q21.33 | CTCAAGTGTGGGGAGTCATGGGGTGTGGAGGGGAGGAAAGGAAAGGTATTTTGTTTCTTTGTCTATACATTTCCTAGATTTCTATGCAGTTGGG | 2199 |
| 3744-R5-1 | 19p13.12 | CTTCTCTTATTCTCCCTGTTTTCATCCTACTTTTAAGTAATAAATTTGGCATTAGTGGGAGGGGAGCAGGGAGGAAGGAGAAG | 2200 |
| 4855-R5-1 | 12q13.11 | GGGTCCGGGTCTCTACCGCGCCCTCATGCAGGAGGCCCTTGGAGCAGGAGGGGGAAGCGGGAGACCCGGCAGCCC | 2201 |
| 5107-L5-1 | 11q23.3 | CAGTTTGTACTGGGGGGTCAAAGGGGAGTTCTTTTCCGAAGAATTCTGGGAGAGACGCCAACTAGAGCAAGCTG | 2202 |
| 6235-R5-2 | 15q26.2 | TCTGTTTTTATCAGTTTAATATATGATACATCTTCTATCCAAGGACAATATATTAAATGGATTTTTGGAGGAGA | 2203 |
| 6474-L5-1 | 1p34.1 | GGTGAAGGGGGAAGAGGGGATGGCTTTAATTAGGGCTTCTTGGCCTCGTCAGTCCTGGGGTTGGTCGGGGTAATCCAGTTAGAGTCCCAGCCT | 2204 |
| | | TTCATCTCAGCTGGCC | |
| 6490-R5-3 | 1q21.3 | TCCTTCCCCCTTCGTGGCTTGCGGTCTCTCTTCCCCGCCTCGGCCCCCAGGAAGTGTGAGTGCTGGGGGTGGTGAGGTTAGGAGGGGGAAGC | 2205 |
| | | GTCATATGGGGGATGGGG | |
| 6681-R2-1 | 11q12.2 | TGTGCTCTCATTGTTATTCCAAAAGTCTCTGTCTAGATCACTGGAGGGGCAGAGAGAGAGGGGAGAAAACAGGGAGATACA | 2206 |
| 7572-R5-2 | 11q12.1 | ATCACCTTTCCCCCTCCCATGTGCTTTCCTTCATTTGAGATCTTTTGACCTTTGGCTTTATTTGGGAGGGGGAAGGGTGAT | 2207 |
| 7883-R5-1 | 11q14.2 | CTCTCCGTGCTTCTCGGCCCGCCGCCCTTCCTGTCTCGGGGACACGGTTTCTAAATAAGGTTGGGAGGGTGAGAGGGCGGGAGGGGAGAG | 2208 |
| 8004-R3-2 | Xq28 | GGGGCTGCCATCCTGCTGTCCGTCATCTGTGTGGTGCTGGTCACGGCCTTCAATGACTGGAGCAAGGAGAAGCAGTTCC | 2209 |
| 836-R4-1 | 3q26.2 | AAATAAGCCATTCCAAACCATTCTCTGATTTGCTGTGAGTGGCAGAATCATTCACCGTGGTGAATCATAGCAGGGAGAACCATTTGGAATGATTATTT | 2210 |
| 9594-R5-1 | 2q12.1 | TTCCAGCTATTTAGTAACTCTTCCAAAACACTGTCAGCACCCATGCTAGGATGCAGGGAGTGGGAAGGAAGTCTAAGTAGGGAA | 2211 |
| let-7c | 21q21.1 | GCATCCGGGTTGAGGTAGTAGGTTGTATGGTTTAGAGTTACACCCTGGGAGTTAACTGTACAACCTTCTAGCTTTCCTTGGAGC | 2212 |
| let-7d | 9q22.32 | CCTAGGAAGAGGTAGTAGGTTGCATAGTTTTAGGGCAGGGATTTTGCCCACAAGGAGGTAACTATACGACCTGCTGCCTTTCTTAGG | 2213 |
| miR-103 | 20p13 | TTGTGCTTTCAGCTTCTTTACAGTGCTGCCTTGTAGCATTCAGGTCAAGCAGCATTGTACAGGGCTATGAAAGAACCA | 2214 |
| miR-103 | 5q35.1 | TACTGCCCTCGGCTTCTTTACAGTGCTGCCTTGTTGCATATGGATCAAGCAGCATTGTACAGGGCTATGAAGGCATTG | 2215 |
| miR-106a | Xq26.2 | CCTTGGCCATGTAAAAGTGCTTACAGTGCAGGTAGCTTTTTGAGATCTACTGCAATGTAAGCACTTCTTACATTACCATGG | 2216 |
| miR-107 | 10q23.31 | CTCTCTGCTTTCAGCTTCTTTACAGTGTTGCCTTGTGGCATGGAGTTCAAGCAGCATTGTACAGGGCTATCAAAGCACAGA | 2217 |
| miR-16 | 13q14.3 | GTCAGCAGTGCCTTAGCAGCACGTAAATATTGGCGTTAAGATTCTAAAATTATCTCCAGTATTAACTGTGCTGCTGAAGTAAGGTTGAC | 2218 |
| miR-16 | 3q26.1 | GTTCCACTCTAGCAGCACGTAAATATTGGCGTAGTGAAATATATATTAAACACCAATATTACTGTGCTGCTTTAGTGTGAC | 2219 |
| miR-17 | 13q31.3 | GTCAGAATAATGTCAAAGTGCTTACAGTGCAGGTAGTGATATGTGCATCTACTGCAGTGAAGGCACTTGTAGCATTATGGTGAC | 2220 |
| miR-200b | 1p36.33 | CCAGCTCGGGCAGCCGTGGCCATCTTACTGGGCAGCATTGGATGGAGTCAGGTCTCTAATACTGCCTGGTAATGATGACGGCGGAGCCCTGCACG | 2221 |
| miR-200c | 12p13.31 | CCCTCGTCTTACCCAGCAGTGTTTGGGTGCGGTTGGGAGTCTCTAATACTGCCGGGTAATGATGGAGG | 2222 |
| miR-20a | 13q31.3 | GTAGCACTAAAGTGCTTATAGTGCAGGTAGTGTTTAGTTATCTACTGCATTATGAGCACTTAAAGTACTGC | 2223 |
| miR-20b | Xq26.2 | AGTACCAAAGTGCTCATAGTGCAGGTAGTTTTGGCATGACTCTACTGTAGTATGGGCACTTCCAGTACT | 2224 |
| miR-298 | 20q13.32 | TCAGGTCTTCAGCAGAAGCAGGGAGGTTCTCCCAGTGGTTTTCCTTGACTGTGAGGAACTAGCCTGCTGCTTTGCTCAGGAGTGAGCT | 2225 |
| miR-320a | 8p21.3 | GCTTCGCTCCCCTCCGCCTTCTCTTCCCGGTTCTTCCCGGAGTCGGGAAAAGCTGGGTTGAGAGGGCGAAAAAGGATGAGGT | 2226 |
| miR-320b | 1q42.11 | TGTTATTTTTTGTCTTCTACCTAAGAATTCTGTCTCTTAGGCTTTCTCTTCCCAGATTTCCCAAAGTTGGGAAAAGCTGGGTTGAGAGGGCAAAAG | 2227 |
| | | GAAAAAAAAAGAATTCTGTCTCTGACATAATTAGATAGGGAA | |
| miR-320b | 1p13.1 | AATTAATCCCTCTCTTTCTAGTTCTTCCTAGAGTGAGGAAAAGCTGGGTTGAGAGGGCAAACAAATTAACTAATTAATT | 2228 |
| miR-320d | 13q14.11 | TTCTCGTCCCAGTTCTTCCCAAAGTTGAGAAAAGCTGGGTTGAGAGGA | 2229 |
| miR-320d | Xq27.1 | TTCTCTTCCCAGTTCTTCTTGGAGTCAGGAAAAGCTGGGTTGAGAGGA | 2230 |
| 10233-R5-1 | 9q34.13 | ACCTTCTGCCTTTGAGACCTGGAAGCCACAGCACTGGTGGACATAAATTCTACTGCCTGCTGCTCCAGATCCAAGGGGAGAGGGT | 2231 |
| 10335-L5-2 | 15q26.1 | TCTTAGTGCTTTCTAATTAAAAAGGAGGGGAGTGGTGATCTTTTTGCTCTCTAAGTTCTGTTTCCTCTGAGTGGAAAGCAGAGGG | 2232 |
| 12184-L4-1 | 3p14.1 | TTGTACACAATATTCGTCTGTGGTTGAAAGGGGGCACGCTGAGGTCAAGTGATGTAGTGTTTTCCATTTTTCCATATGAGTCTCACAGTGTGCGA | 2233 |
| 12223-L5-1 | 4q27 | TAGAGGGAGAAGAAACAACTCTGTCTGATGTCTTCTGGGATGGCCTTAATACAGATAGCATTGTCTCTTCCATTTCTG | 2234 |
| 12695-R5-2 | 1q22 | TCCCCGCCACCCTTGGAGCACCTCAGCGTTCTTAGGGGAAGCCAGAGCCGGGGAGGATGCGGGAATAGGTTTGGTGGGGG | 2235 |
| 12721-R5-2 | 12q13.13 | TTCACCCATGACCCTTGTCCTCACCCCCACCCAAGGGGTCATAGTCCAGTGAGGGTGAGCTGGTCAGAGTGGA | 2236 |
| 12729-R5-1 | 17q25.3 | AAATTAAAGAAAAAAAATTCTCCACCAAAAGCGCCGCAGTGACAGTTCCCAACATTTTCTGCCTTTCTTCTTCCCCTCCCTGCACCACTAGGAGG | 2237 |
| | | GAGAAGGCACACAATTGCATTTTCGTCGCTTTTTAATTTTTTTTTTTTGGTTT | |
| 12888-L5-2 | 2q32.3 | TCCTCCAGGAGCTGGGAGAACCATACAATGTAGGAAAAATATAGTTTAATTGAATGGTACTCTGGTCTTCTGGAGGA | 2238 |
| 12911-L5-1 | 22q12.3 | ACGAAGGAGGAAAAGGAAGGAGGTGTCAGTTGGACTGCCCCAAGGCAACCCTTGAGCCATCAGGACAGCTCAACACCTCCTCTGTTTTCTTCTT | 2239 |
| | | TGT | |
| 12917-R5-2 | 1p34.1 | GGACCTGGGGGCTTCTCTGACCCTTGAACAGCTTATACTATGAGACCTTGGGAACCTCCTCCATGCAGACACACAAGGCTCAATGTTGGGGGA | 2240 |
| | | AGGGAAGGGCCCATAGGTCC | |
| 12947-R5-3 | 6p21.1 | GCCTTGTCTGAAGGGAGAGGCCCTGGCATGCGGATGGGAGATTTAGAGGCTGTGGAGAAGGGAACTTGGGGCTTTCCTTCCTTCGTGGCCTC | 2241 |
| | | ACTCCCCTGGGGCCTCTCTCTATGGAGGGGGC | |
| 12992-L5-1 | 9q31.3 | TAGAGATGGGGGTGGAGGGAAGCAGGTATGATTTCAGGGGCAGCAGGAGATTCTCTTCTGTTTCCCTCTCTCCCAGCTCTA | 2242 |
| 13001-L5-1 | 12q13.13 | TGGAGCTGGGAGTGGTATCTAGGAATTTCTCCTTCTAGTTTTTACCTTCTTAGTTTTA | 2243 |
| 13070-R5-3 | 5q35.1 | CTGCTCTCCTTGACCTGGTAGGAAGGTGATTTGATGGTTTTCAAACACATGCTGTTTCTCTCTTTCATCAGGGTAGCTGGGTGGGTGGCATTAGG | 2244 |
| | | TCCTTTGGACTGGGGAGAGGAGACAG | |
| 13115-L5-3 | 1q21.3 | AGGGAAAGGCAAGGGTAGCCATTGTTTGGGTTGGGGTGGTCGGCCCTGGAGGGGGTTTGTTTGCTTATTCCCCTCTGTGCTTCACCCCTACCC | 2245 |
| | | AGCTTCCCGCCAGAAAGCCCTG | |
| 13124-L5-2 | 1q22 | TGAGGGGTAAGTTTAGGCTTTCGCGGAGGGGAGGAGACATGGAGCCTGGGAACTCCTTGTTCTCCCCTCTGCTGCCTCTCCCCACCCCTTA | 2246 |
| 13195-L5-2 | 3p21.1 | AAAAAAAAAAAAGATACTAATACAAATGGTCATGGAGGGGGAATATAGAGAAGATCAATTTTGTACAGAAAAACCATTGGTTAGTATTTTTTTTTCTTTT | 2247 |
| 13237-L5-4 | 1q21.3 | GGCAAGGGTAGCCATTGTTTGGGTTGGGGTGGTCGGCCCTGGAGGGGGTTTGTTTGCTTATTCCCCTCTGTGCTTCACCCCTACCCAGCTTCCCGCC | 2248 |
| 13274-L5-3 | 12q13.13 | AGGTGGTGGTGGGGAGGACCCTGAGGGAGGGTGGGAGCACGGGAGAAGAGAAGGCATACCCAACCTGACCTACTTACCTGTCCCCTACCCCA | 2249 |
| | | CAGAGGGCTTCCCTGGAGGCCGCCATTGC | |
| 13278-R5-2 | 22q11.21 | TGGTTCTCTGTGTTTTGTGGACTGTGCTCTCACTGTTCACCCAGCACTAGCAGTACCAGACGGTTCTGTGGAGTCCTGGGGAATGGAGAGAGCA | 2250 |
| | | CAGTCTGACGCCCTGCCAA | |
| 13278-R5-2 | 12q13.13 | TGGTTCTCTGTGTTTTGTGGACTCTGCTCTCACTGTTCACCCAGCACTAGCAGTACCAGATGGTTCTGTGGAGTCCTGGGGAATGGAGAGAGCA | 2251 |
| | | CAGTCTGACTCCCTGCCAAGTAGCCAG | |
| 13287-L5-4 | 1p35.2 | TCCGCCGAATAACTCCATGTGGGTCTTGGGAGGAGGGTGGGGTGGCTCCTCTGCAGTGAGTAGGTCTGCCTGGAGCTACTCCACCATCTCCCC | 2252 |
| | | CAGCCCCTGTATGGCTGGGAGGGGAA | |
| 13343-L5-4 | 17q25.3 | TGAGGGGGAGGGGCGCTGCGGGAGGGGTGGAGGGCCCAGGGAAGGGTGAGGGGCCGGGAGCCACTCTGCCCGGCACTCTCCGCCCAGAA | 2253 |
| | | ACAGCCCAACGCCCCTTTCTTTCCCCTTT | |
| 13357-L5-4 | 19q13.2 | TCAGGGTTTGGTGTACAATTGTGGGAGGCTGCAGGGAGGTGTGGGGAGAAGGTCCGCTTTAGAGCTTGGTCCCTCTGTGCTCACCTCCCAGCC | 2254 |
| | | CCAAGCCCCCAGCACCGGATCCTG | |
| 13358-L5-2 | 19q13.32 | CGGCCAGTGACTTCCCCAGGAGTGTGGAGGGGGTGGTGAGGAGGAGCACCTGGGCTCTCTACCCCTCTCCTCACAGAAGTACCTGAAACTAGGTC | 2255 |
| 13366-R5-3 | 19p13.2 | GGGCCGGTGAAGGCCCCGCCTGGGTCCCATACCCGGGGTTGGGGGTCAGAAGCCGCTCGGTCTCTGTGGGAATAGGAGAGGGCACTGGGGT | 2256 |
| | | GAGGCCTG | |
| 13395-R5-2 | 22q11.21 | TGGTTCTCTGTGTTTTGTGGACTGTGCTCTCACTGTTCACCCAGCACTAGCAGTACCAGACGGTTCTGTGGAGTCCTGGGGAATGGAGAGAGCA | 2257 |
| | | CAGTCTGACGCCCTGCCAA | |
| 13403-L5-2 | 22q13.1 | ACCAGGTGGGCCTGGCCCCAGGTTGGGGGGACACGGGTGGGTCCCGGCACCCCTCCCCTGACCACCGTGCCTCTCCCAGGA | 2258 |
| 13467-L5-1 | 5q35.2 | TTTGACTTGGAGCAAGGAGGGTCTGACTGTCACTTGGAGCTAAACCAGTCTCCAAGTGGCCATCAGACCCTCTTTGCCCCAAGTCAGT | 2259 |
| 13470-R5-1 | 5q13.2 | GGTCAGTCTAGCTTGCTCTTGAAGCTCTCCAGAGACAAAGAAGCCTGTAGCAAATCACAATGAGGATTCTGGTCCCTGAGGTGGAGAGGGTGG | 2260 |
| | | GAGCCCCACTGTTTGCCC | |
| 13472-L5-1 | 5p15.33 | GACAGACAGGAGGACGTCACACACAGTGCTCTGAGGACCTCACTTGCCCTGTGGCGGCTGCCCTCCAAACACACTGTG | 2261 |
| 13508-L5-3 | 7p14.1 | GAGAGGTGTCTGTGAGGAAGCTAAGAGCAGAAGGAGAGCAGCCTGTCAGAAAACGGGCTGTCCCTCCCTCCCTAATCACAGCCCTACTCACAG | 2262 |
| | | CAAACTCCCTCCCTCTCCA | |
| 13530-L5-3 | 9q33.3 | CTACAGCTTGGCAAAAAGGGAGAACTTAGGGGGACCCAGGGGAAGGAGGAAGGCCACCCCACTCCCTTCCTGCCATTCCTGTCATCCCAGCG | 2263 |
| | | AGGCCTCCGACCCTGCAAAAGGCTGTGAG | |
| 13546-R5-2 | Xq28 | GGAAAGGACCAGGGATGGCCTGCACCCCTCGGGAAGCTTGGCCAAGGTGCCCTGGGAGGGTGCCCTGGGAGGGTGACGGGATGGAGAGGG | 2264 |
| | | TGGAGGCACCCTGCTGGAAGCCAG | |
| 3875-R5-2 | 5p15.1 | GGCTCGGTTTCAAATCTCTCCTAATCCACTAATGAACCTTTATTAAAGTGGGAGAGAGAGGTTGAATCAGTC | 2265 |
| 3923-R5-1 | 19p12 | GGCTCTGCACCAGGCGTTTCTTCTTGTGTTTCCTCTTCTCTTCTGGAGAGGGATGAAGGAGATCCTTTGTGAGAGGC | 2266 |
| 5108-R5-2 | 2p13.1 | CCAATGCCTCTCACCTCCTCACTTGTGGCACCTTCGCTTTTGATCCGAAGTGCGGGGTTATTGTGAGTGACGGTGTGGGAGGAGAGGG | 2267 |
| 5192-L3-2 | 5q35.1 | GTCTTTGCTGATATAGAGGAAGGAAGGGGAAAAATGAGCGCATTAGTTCTCTTTTATTAAAAGAGTTATTTCAGCATGAC | 2268 |
| 5306_B-R4-1 | 12q13.13 | TTCACCCATGACCCTTGTCCTCACCCCCACCCAAGGGGTCATAGTCCAGTGAGGGTGAGCTGGTCAGAGTGGA | 2269 |
| 5633-L5-1 | 15q25.2 | CAAGTCCTGGAGAGGGTCTCCAGGAGCCAGGGAGGGAGTGACTAACTTCTGACTGCCTGGGGGCCTGAGAGAAGGCTGGGACTTG | 2270 |
| 5638-R5-2 | 6q23.2 | GGCTTTGCCCTTTTCGGTGACACAGGCTGTTGCTATTCCAAGCAGCCTATCACAGGCAGGGGGAGGGCC | 2271 |
| 5723-R5-1 | 4p15.31 | CCTCTGCCTGGCTTTCTTTGTAAAGCCATTAAACTACATTAAGAAGGCTACTGCTGGAGAAAGGGGAGGAGG | 2272 |
| 5735-L5-1 | 5q31.1 | CCCCCACAGGCTTGAGGCCAGAGGAAACAGCAACTTTCTTCGCTGGGAAAGTGTTGTGGGGCTCAAGCATTTGGGGG | 2273 |
| 6183-R5-1 | 12q21.33 | GATTCATCTATTCTTTTTCTCCTTCTTCAAAGATAACTCTGTAAGCACTTAAGGAGGGGAAAGTCATTAAGAAAAGTGGAATC | 2274 |
| 6216-R5-1 | 11q14.1 | CATGTGATTTCTGCCCAGTGCTCTGAATGTCAAAGTGAAGAAATTCAATGAAGCACGGGTAAACGGCGGGAGTAACTATG | 2275 |
| 6490-R5-3 | 1q21.3 | TCCTTCCCCCTTCGTGGCTTGCGGTCTCTCTTCCCCGCCTCGGCCCCCAGGAAGTGTGAGTGCTGGGGGTGGTGAGGTTAGGAGGGGGAAGC | 2276 |
| | | GTCATATGGGGGATGGGG | |
| 6496-R5-2 | 5q31.1 | CTCCCTCAGGCCCCGCCTGCACCTTTCCCAGCCCCCAGGACTCTAGGGGAAGTGGTGGGTGGGGGAGGGGG | 2277 |
| 6584-L5-1 | 12q24.23 | GCTTGGTGAGAGGAGGAGGAGGCAGGGCCGACCGCCACCCGCCTGTCTGCCATCTGGTCCCCTTCCCCTCCCTCCTCTCATTGC | 2278 |
| 6647-R5-1 | 1q23.3 | CTCAGTATCTTCAGCTTGGGAAACTGACCTCGTTAATTTTAATGAGGGGAAAAATTCTCCAGCTGGGGCTGAG | 2279 |
| 6752-R5-2 | Xq13.1 | CCCTCCCAGTTCCCATAGCAACTGGGCTGTAGCAGCCAGAACTTGATTGAGCCCAGCAGTGGCCCGACTGAGGTGGGGAAAGGAGGG | 2280 |
| 6803-R5-2 | 22q12.3 | GCCACCTTTCATGGTGAGGATGCCTGCCACCTTCAGGATCACATCTTTGGGTGAGGTCCAACCAGAGAGGGAGC | 2281 |
| 6930-R5-1 | 9p21.3 | TGTCATTTGTCCATTTTCTCTTCTGACCCAGTGGTATTCTGCAAGATCAGAGGGGAGAGAAGGATTAATGTCA | 2282 |
| 7113-R5-1 | 18q21.2 | CGTCTTGCTGGCTCCCCAAGGCTTCCAGGCATTTGCCCATCTGGTGAGGCCTCCGGAGCAGGGGGGCTAATTAGGCG | 2283 |
| 7192-R5-1 | 9q33.1 | TGTAGCAAATCCCATCCATCTGTTTGGCTGCTCTTGCCTCAGTGACAGTGCCAAGAGCCCAGGCAGACTTAGAGGGGGAAGTGCTTTGCA | 2284 |
| 7384-R3-1 | 12q12 | GGCATTTCTTCTTGTGTTTCCTCTTCTCCTCTTCTGGGGAGGGATGAAGGAGATCCTTTGCGAGAGGCATGTT | 2285 |
| 7571-L5-1 | 2p21 | CTTAGGGGTGGGGGAGCCCTGTTAGCCCTGTAAATAAAGTTTAACGAGGTGAACAATGGCTGGCTCTGTCCCTGAG | 2286 |
| 836-R5-2 | 3q26.2 | AAATAAGCCATTCCAAACCATTCTCTGATTTGCTGTGAGTGGCAGAATCATTCACCGTGGTGAATCATAGCAGGGAGAACCATTTGGAATGATTA | 2287 |
| | | TTT | |
| 8433_C-R4-1 | 17q25.3 | AAATTAAAGAAAAAAAATTCTCCACCAAAAGCGCCGCAGTGACAGTTCCCAACATTTTCTGCCTTTCTTCTTCCCCTCCCTGCACCACTAGGAGG | 2288 |
| | | GAGAAGGCACACAATTGCATTTTCGTCGCTTTTTAATTTTTTTTTTTTGGTTT | |
| 8433-L3-1 | 17q25.3 | CGGTGGAGGGAAAGGGGAAAGGAGCCATTTTCTGCTGCACATCAGTCAGTGCCTGCGCCCTCCCTCCCTCCGCCG | 2289 |
| 8724-R5-2 | 15q23 | GGCCCAGAAGATGAAAAGCTGAAGTCCTTTCCCTTCCAGCTGAAGCCAGGTGTGATGCTGGCAGGGAGAGGTTCCAAGCTTGGCC | 2290 |
| 8808-R5-1 | 3p14.3 | CCGATTATGGCTTTCTTCTCCTGCCCTTTCAGTAGTGATTTGCAGAAACAGGCTGGGAGAAAGGGGTCTTTGG | 2291 |
| 8832-R5-1 | 9q33.2 | TTCTGAGATATGATCTGTTGGATTCTCTACTACCAAAGTGGGGGAAAAACAGGTGGTACTCCAGAA | 2292 |
| 9349-R5-2 | 21q22.11 | GGACACTCTGAACCCCAAGTGGAATTCCAACTGCCAGTTCTTCATCCGAGACCTGGAGCAGGAAGTCCTCTGCATCACTGTGTTC | 2293 |
| let-7b | 22q13.31 | CGGGGTGAGGTAGTAGGTTGTGTGGTTTCAGGGCAGTGATGTTGCCCCTCGGAAGATAACTATACAACCTACTGCCTTCCCTG | 2294 |
| let-7e | 19q13.33 | CCCGGGCTGAGGTAGGAGGTTGTATAGTTGAGGAGGACACCCAAGGAGATCACTATACGGCCTCCTAGCTTTCCCCAGG | 2295 |
| miR-1268 | 15q11.2 | TAGCCGGGCGTGGTGGTGGGGGCCTGTGGTCCCAGCTACTTTGGAGGCTGAG | 2296 |
| miR-1274b | 19q13.43 | CTTCTTCACTCACGTCCCTGTTCGGGCGCCACTTGTGGCTGTCGGTTCGGGACTGAATGAAGAAGGA | 2297 |
| miR-15b | 3q26.1 | TTGAGGCCTTAAAGTACTGTAGCAGCACATCATGGTTTACATGCTACAGTCAAGATGCGAATCATTATTTGCTGCTCTAGAAATTTAAGGAAATTC | 2298 |
| | | AT | |
| miR-181a | 1q31.3 | TGAGTTTTGAGGTTGCTTCAGTGAACATTCAACGCTGTCGGTGAGTTTGGAATTAAAATCAAAACCATCGACCGTTGATTGTACCCTATGGCTAA | 2299 |
| | | CCATCATCTACTCCA | |
| miR-181a | 9q33.3 | AGAAGGGCTATCAGGCCAGCCTTCAGAGGACTCCAAGGAACATTCAACGCTGTCGGTGAGTTTGGGATTTGAAAAAACCACTGACCGTTGACTGTACCTTGGG | 2300 |
| | | GTCCTTA | |
| miR-198 | 3q13.33 | TCATTGGTCCAGAGGGGAGATAGGTTCCTGTGATTTTTCCTTCTTCTCTATAGAATAAATGA | 2301 |
| miR-222 | Xp11.3 | GCTGCTGGAAGGTGTAGGTACCCTCAATGGCTCAGTAGCCAGTGTAGATCCTGTCTTTCGTAATCAGCAGCTACATCTGGCTACTGGGTCTCTGATGGCATCTT | 2302 |
| | | CTAGCT | |
| miR-26a | 3p22.2 | GTGGCCTCGTTCAAGTAATCCAGGATAGGCTGTGCAGGTCCCAATGGGCCTATTCTTGGTTACTTGCACGGGGACGC | 2303 |
| miR-26a | 12q14.1 | GGCTGTGGCTGGATTCAAGTAATCCAGGATAGGCTGTTTCCATCTGTGAGGCCTATTCTTGATTACTTGTTTCTGGAGGCAGCT | 2304 |
| miR-30d | 8q24.22 | GTTGTTGTAAACATCCCCGACTGGAAGCTGTAAGACACAGCTAAGCTTTCAGTCAGATGTTTGCTGCTAC | 2305 |
| miR-720 | 3q26.1 | CCGGATCTCACACGGTGGTGTTAATATCTCGCTGGGGCCTCCAAAATGTTGTGCCCAGGGGTGTTAGAGAAAACACCACACTTTGAGATGAATTAAGAGTCCTT | 2306 |
| | | TATTAG | |
| miR-92a | 13q31.3 | CTTTCTACACAGGTTGGGATCGGTTGCAATGCTGTGTTTCTGTATGGTATTGCACTTGTCCCGGCCTGTTGAGTTTGG | 2307 |
| miR-92a | Xq26.2 | TCATCCCTGGGTGGGGATTTGTTGCATTACTTGTGTTCTATATAAAGTATTGCACTTGTCCCGGCCTGTGGAAGA | 2308 |
| miR-92b* | 1q22 | CGGGCCCCGGGCGGGCGGGAGGGACGGGACGCGGTGCAGTGTTGTTTTTTCCCCCGCCAATATTGCACTCGTCCCGGCCTCCGGCCCCCCCGGCCC | 2309 |
| miR-936 | 10q25.1 | TCAAGGCCACTGGGACAGTAGAGGGAGGAATCGCAGAAATCACTCCAGGAGCAACTGAGAGACCTTGCTTCTACTTTACCAGGTCCTGCTGGCCCAGA | 2310 |
| miR-98 | Xp11.22 | AGGATTCTGCTCATGCCAGGGTGAGGTAGTAAGTTGTATTGTTGTGGGGTAGGGATATTAGGCCCCAATTAGAAGATAACTATACAACTTACTAC | 2311 |
| | | TTTCCCTGGTGTGTGGCATATTCA | |

TABLE 30
Target RNAs present at at least 5-fold decreased levels in at least four cell lines

| | | | | | | | | | | Number of |
|---|---|---|---|---|---|---|---|---|---|---|
| Gene | | | | | | | | | | cell lines with at |
| Down expressed | | | | calu3 | H146 | H187 | H23 | H520 | H69 | least a 2-fold |
| in Cell lines | Probe sequence | SEQ ID NO | Calu1 FC | FC | FC | FC | FC | FC | FC | increase |
| 10010_B-L4-1 | GCCGAGCCCCCGCCCCCGCCGGGATGCTGCCCTCCGGAA | 2312 | −16.79 | −8.41 | −4.11 | −2.74 | −7.08 | −22.10 | −2.85 | 0 |
| | GGAGGGGCGCTGCCC | | | | | | | | | |
| 10010_D-L4-1 | TGGCGCCCTCCCCCGCCCGGGGCTCAGCCTCTCACCTG | 2313 | −30.70 | −30.70 | −2.08 | −4.60 | −3.76 | −16.38 | −1.22 | 0 |
| 10138-L2-1 | AGCCTGCTCCGCTCTCCCCTCCCACCAGAAAAAGT | 2314 | −7.46 | −7.46 | 1.75 | −1.81 | 1.87 | −2.04 | 7.73 | 1 |
| 10231-R3-1 | TGAACTTTAGCTGGGCCGCCGCCTGTCAGC | 2315 | −29.14 | −29.14 | −3.13 | −4.48 | −29.14 | −29.14 | −5.84 | 0 |
| 10242-R5-1 | GAAGCCCTTCCGCTTCCACCCCGAACAC | 2316 | −25.94 | −25.94 | −14.00 | −25.94 | −25.94 | −25.94 | −8.13 | 0 |
| 10342-R2-2 | CCCGCCGCCGGAGCATCTCGAAGTTAATTAAA | 2317 | −28.71 | −3.68 | −4.01 | −2.19 | −10.93 | −50.54 | −3.01 | 0 |
| 11370-L4-1 | CCTCCGCCCCCACACTGCATCCTTGCCCAGTTTGGCTGCCA | 2318 | −5.20 | −5.20 | 1.61 | −2.49 | −2.57 | −2.80 | 3.46 | 1 |
| | TCAGTATTGTCCCCTGAGAACTGGAC | | | | | | | | | |
| 11370-L5-5 | CCCTCCGCCCCCACACTGCATCCTTGCCCAGTTTGG | 2319 | −5.86 | −5.86 | 1.74 | 1.95 | 1.55 | −3.00 | 4.02 | 1 |
| 12223-L4-1 | CCCAGAAGACATCAGACAGAGTTGTTTCTTCTCCCTCTA | 2320 | −5.20 | −5.20 | 2.99 | −2.63 | −5.20 | −5.20 | 5.56 | 2 |
| 12691-R5-1 | CCCCGCCCCTGGCGCGCCCCCGACAGGC | 2321 | −46.43 | −46.43 | −6.02 | −32.36 | −46.43 | −46.43 | −3.50 | 0 |
| 12692-L5-1 | GACCCGGCCCCGCAGCCAGCACCCGGCCACCGCGC | 2322 | −7.57 | −7.57 | 1.00 | −5.34 | −7.57 | −7.57 | 1.21 | 0 |
| 12693-L5-1 | GTCGCGGCCGCCCGGCCCTCCCGGTCCCCTCCCC | 2323 | −34.28 | −34.28 | −4.19 | −6.29 | −2.25 | −14.44 | −1.05 | 0 |
| 12694-R5-1 | TCAGCCCCCAGCGCCCCCCGGAGTTCTTGGA | 2324 | −85.43 | −85.43 | −17.02 | −29.82 | −85.43 | −85.43 | −6.11 | 0 |
| 12695-R5-1 | AAACCTATTCCCGCATCCTCCCCGGCTCTGGC | 2325 | −44.55 | −44.55 | −3.70 | −3.25 | −13.08 | −32.36 | −1.29 | 0 |
| 12696-R5-1 | CCGGGCTCCCCCACCCGCTCCCTGAGC | 2326 | −9.47 | −9.47 | 1.52 | −3.26 | −4.38 | −9.47 | 2.17 | 1 |
| 12696-R5-2 | AACCCGGGCTCCCCCACCCGCTCCCTGA | 2327 | −38.89 | −38.89 | −2.62 | −3.23 | −12.87 | −26.21 | 1.03 | 0 |
| 12697-R5-1 | CCGGTGTGCGCCCCCTCCTACCTCTGCCGGCC | 2328 | −26.89 | −26.89 | −5.74 | −13.37 | −13.11 | −5.78 | −1.74 | 0 |
| 12699-L5-1 | GGCGCCCTGGGCCTCGGCGCCCCGCCCGTCCCAG | 2329 | −9.80 | −9.80 | −2.20 | −4.84 | −9.80 | −9.80 | −1.77 | 0 |
| 12701-L5-1 | AAATCCTCGCCATCCTCCACCCCCAGCCCCGG | 2330 | −24.62 | −24.62 | −2.85 | −2.72 | −5.56 | −12.45 | −1.45 | 0 |
| 12703-L5-3 | AGCCGAGCCCCCGCCCCCGCCGGGATGCTGCCCTC | 2331 | −64.38 | −60.80 | −7.33 | −2.94 | −20.92 | −66.02 | −9.82 | 0 |
| 12704-L5-1 | CCTCCCCCGCCCGGGGCTCAGCCTCTCACCTG | 2332 | −8.28 | −8.28 | 1.19 | −1.16 | −1.79 | −4.47 | 2.96 | 1 |
| 12704-L5-2 | CTGGCGCCCTCCCCCGCCCGGGGCTCAGCCTC | 2333 | −7.28 | −7.28 | −1.14 | −1.77 | −1.61 | −5.51 | 2.57 | 1 |
| 12713-R5-1 | CTCTCGCGACCGACCTGCCGCCGACCGCCACAG | 2334 | −43.69 | −9.13 | −3.01 | −2.22 | −23.87 | −33.93 | −2.33 | 0 |
| 12722-L5-1 | AAACAAAGTACTTCCGACCTCCCCGCCCGCCCGC | 2335 | −34.34 | −6.02 | −2.48 | −2.05 | −6.64 | −8.13 | −1.75 | 0 |
| 13004-R5-1 | CTCCAACCCCCGCAATTCTCGCTCCCTTCACCTGA | 2336 | −35.18 | −35.18 | −5.05 | −10.62 | −35.18 | −35.18 | −2.20 | 0 |
| 13006-R5-4 | CCCGGCTCTCCCTCCCCTGCGCCGCGCTCTCGCC | 2337 | −13.41 | −29.15 | −1.35 | −3.15 | −4.57 | −3.39 | 1.17 | 0 |
| 13044-L5-3 | CCCATCCCAGCTGTCCCTTTCTTTGCTTTCATCA | 2338 | −23.71 | −23.71 | −17.84 | −12.27 | −23.71 | −23.71 | −4.70 | 0 |
| 13044-L5-4 | CCAGGGCTTCTCCCATCCCAGCTGTCCCTTTCTTTG | 2339 | −30.11 | −30.11 | −4.72 | −5.11 | −30.11 | −30.11 | −2.34 | 0 |
| 13047-R5-2 | GCACAGCAGACCCCATGCACTAGCCCCGGGCAC | 2340 | −19.29 | −19.29 | −19.29 | −19.29 | −19.29 | −19.29 | −19.29 | 0 |
| 13052-L5-1 | TCCCCGGACCTAAGCATCTCCCCCACCCGCCAACC | 2341 | −6.46 | −6.46 | 1.30 | −2.05 | −2.52 | −4.72 | 4.47 | 1 |
| 13093-L5-2 | CGACCCCGCAGAACCCCACCGCGCCCCGCGCAG | 2342 | −45.57 | −45.57 | −16.39 | −23.29 | −45.57 | −45.57 | −10.53 | 0 |
| 13097-L5-2 | AGCCTCAGCCCCACCTCCAGCCCCACCCTAGGG | 2343 | −7.94 | −7.94 | −1.16 | −3.99 | −5.23 | −7.94 | 1.33 | 0 |
| 13106-R5-1 | ATCAGAGGCCGACCCCGGCGTCCAGGCCGGCA | 2344 | −37.32 | −37.32 | −26.17 | −37.32 | −37.32 | −37.32 | −24.68 | 0 |
| 13106-R5-2 | TGGACCAATCAGAGGCCGACCCCGGCGTCCAG | 2345 | −42.08 | −42.08 | −35.48 | −42.08 | −42.08 | −42.08 | −9.62 | 0 |
| 13111-L5-3 | TCTCCGCCGGGCCTTCACCCTGCCCTGCTCTTCT | 2346 | −8.41 | −8.41 | 1.41 | 1.94 | −4.26 | −6.40 | −1.19 | 0 |
| 13119-R5-2 | GACTCTGCCGCTCCCGCCCGGCCACCTCCCTGT | 2347 | −6.27 | −5.25 | −3.10 | −2.23 | −8.08 | −8.44 | −2.59 | 0 |
| 13129-L5-2 | GTCCCCTGGCCCCCGACCTGCTCCATCCACCCA | 2348 | −10.72 | −10.72 | 1.69 | −2.03 | −7.75 | −4.28 | 4.56 | 1 |
| 13129-L5-3 | GTCCCCTGGCCCCCGACCTGCTCCATCCACCCA | 2349 | −10.72 | −10.72 | 1.69 | −2.03 | −7.75 | −4.28 | 4.56 | 1 |
| 13129-L5-3 | AGCCTTCCTGTCCCCTGGCCCCCGACCTGCTCCA | 2350 | −8.92 | −15.69 | −1.15 | −1.02 | −5.81 | −15.69 | 3.68 | 1 |
| 13130-L5-1 | AGCCCGCCCCAACCCACCTCGATCTTTTCCTC | 2351 | −2.96 | −5.75 | −1.02 | −2.38 | −7.72 | −7.44 | −1.49 | 0 |
| 13130-L5-2 | TCCCCAGAGCCCGCCCCAACCCACCTCGATCT | 2352 | −19.17 | −11.28 | −2.91 | −4.08 | −19.00 | −28.42 | −1.70 | 0 |
| 13137-L5-1 | GCTCTAACCCCCGCAACCCCACCTCCCCATGCC | 2353 | −6.42 | −6.42 | 1.22 | −1.92 | −2.51 | −6.42 | 2.70 | 1 |
| 13138-R5-1 | TTCGCCACGCCCCGCCACCCGAGCTGCCTCCC | 2354 | −22.78 | −6.06 | −3.57 | −2.48 | −3.75 | −4.73 | −2.04 | 0 |
| 13161-L5-4 | TCCGCCAGGGTCCGCGTGTCAGTCCCCTCTGGTGA | 2355 | −60.36 | −106.72 | −106.33 | −4.55 | −225.31 | −225.31 | −122.88 | 0 |
| 13209-R5-3 | TGGTCGCCGCCGCAGGCGCCTGAAGGGCACGGCGG | 2356 | −23.10 | −23.10 | −23.10 | −23.10 | −23.10 | −23.10 | −14.65 | 0 |
| 13211-L5-1 | ACGCGCCCCGCCGCTCTCTGACCGACCGGAGGCGC | 2357 | −33.55 | −33.55 | −13.40 | −24.17 | −33.55 | −33.55 | −8.31 | 0 |
| 13227-L5-1 | CTCCTCGTCCCCCTTCCCACCTCGGTGTCTTGCTT | 2358 | −25.42 | −25.42 | −3.92 | −12.50 | −2.75 | −12.60 | −4.39 | 0 |
| 13227-L5-2 | GGGCCCAGTCCTCCTCGTCCCCCTTCCCACCTCGG | 2359 | −24.86 | −38.26 | −4.08 | −9.37 | −2.60 | −5.71 | −1.14 | 0 |
| 13229-L5-1 | ACCCGTCCCTGCCCCTTTACCCCTTGGGCCAGCA | 2360 | −6.14 | −6.14 | 1.13 | −3.09 | −3.21 | −4.58 | 2.42 | 1 |
| 13229-L5-2 | CCTGGGGCCACCCGTCCCTGCCCCTTTACCCCTT | 2361 | −7.44 | −7.44 | −1.25 | −7.44 | −7.44 | −7.44 | 3.22 | 1 |
| 13229-R5-3 | GCAGCTCCGCCAGTCTCTGTGGGCAGGGAGAAG | 2362 | −29.88 | −18.41 | −18.21 | −1.79 | −29.88 | −29.88 | −6.56 | 0 |
| 13239-L5-2 | CAGAGCTCCCCCCATCTCCCCAGACTTACCCCT | 2363 | −5.36 | −5.36 | −1.08 | −3.59 | −3.58 | −5.36 | 3.91 | 1 |
| 13240-L5-2 | AATCGCCGTCCCCGCCGCGGCATTCCCGGCCCCAA | 2364 | −28.53 | −28.53 | −2.82 | −2.43 | −28.53 | −21.92 | −1.98 | 0 |
| 13247-L5-3 | TCCTGAGCCGCCTTCCCCTCCCGACCTCAGAGCCCT | 2365 | −13.68 | −19.46 | −1.59 | −1.37 | −1.28 | −2.19 | 1.48 | 0 |
| 13267-L5-1 | CACTCCCTGCTGGCCCCCACCTCACCTATGGTG | 2366 | −58.86 | −58.86 | −9.66 | −17.90 | −7.03 | −39.11 | −1.08 | 0 |
| 13276-L5-4 | CCCCCATTGTGGCTGCTCCCACCCCACCTGCCTTCA | 2367 | −9.13 | −3.05 | −1.92 | −2.52 | −1.28 | −2.58 | −1.50 | 0 |
| 13281-L5-3 | CACCCCCACCCCACAGGACAGAGGAAGTGACGAG | 2368 | −17.40 | −17.40 | −2.72 | −9.25 | −17.40 | −17.40 | −1.76 | 0 |
| 13283-L5-3 | GGACCCCTGCCTTCCTTGCTGCCACCCTTTGCACA | 2369 | −5.08 | −5.08 | −1.49 | −2.73 | −5.08 | −5.08 | 1.94 | 0 |
| 13285-L5-3 | GCTATGCACCCAGCCGCCCAGCTCAGCCCCTGC | 2370 | −13.41 | −13.41 | −2.23 | −7.03 | −13.41 | −13.41 | −1.61 | 0 |
| 13289-L5-3 | GCTCAAAGTTTGCCTCCCATGGCCCCTCTGCCC | 2371 | −5.97 | −5.97 | −1.04 | −2.79 | −5.97 | −5.97 | 1.72 | 0 |
| 13291-L5-2 | TGGTTCTGCCCAAGCGCCCCTTCCTCCCTCCTT | 2372 | −5.00 | −5.00 | 1.36 | −3.54 | 1.37 | −2.63 | 3.53 | 1 |
| 13312-L5-2 | TGCCACCCCACCCCTCCCCCACAGCCCAGCCC | 2373 | −6.79 | −15.24 | −1.49 | −6.97 | −1.11 | −3.12 | 1.59 | 0 |
| 13325-R5-1 | CTGCCTGGCGCTGGGCTCTTCCCCATGAGCG | 2374 | −8.15 | −8.15 | −1.33 | −3.29 | −8.15 | −8.15 | 2.04 | 1 |
| 13325-R5-2 | TCCAACACTGCCTGGCGCTGGGCTCTTCCCCA | 2375 | −8.85 | −8.85 | 1.23 | −1.20 | −8.85 | −8.85 | 2.07 | 1 |
| 13326-L5-1 | TCCGGCTTCCCCCCACCCGCCCTTCGATGGCA | 2376 | −5.52 | −5.52 | 1.33 | −1.60 | 2.24 | −1.93 | 2.59 | 2 |
| 13326-L5-2 | CAGAGATTCCGGCTTCCCCCCACCCGCCCTTC | 2377 | −10.44 | −14.87 | −1.59 | −3.94 | −1.48 | −5.00 | 1.20 | 0 |
| 13343-L5-1 | CCTCCACCCCTCCCGCAGCGCCCCTCCCCCTCA | 2378 | −54.66 | −54.66 | −2.68 | −1.95 | −2.09 | −4.50 | −1.06 | 0 |
| 13349-L5-1 | TGTGTGGGCTATCCCAGCCGCCTCCTTCCTCT | 2379 | −6.04 | −6.04 | 1.05 | −1.36 | −6.04 | −6.04 | 1.40 | 0 |
| 13349-L5-2 | CACCACCTGTGTGGGCTATCCCAGCCGCCTCC | 2380 | −17.13 | −17.13 | −4.48 | −12.67 | −17.13 | −17.13 | −2.49 | 0 |
| 13365-L5-3 | TCCCCAGAGCCCGCCCCAACCCACCTCGATCTTTT | 2381 | −12.64 | −27.91 | −4.88 | −2.98 | −22.68 | −21.98 | −1.53 | 0 |
| 13374-R5-1 | AGCCTTCCTGTCCCCTGGCCCCCGACCTGC | 2382 | −20.45 | −20.45 | −2.48 | −5.82 | −13.37 | −11.72 | −1.59 | 0 |
| 13374-R5-2 | GGCCCTAGCCTTCCTGTCCCCTGGCCCCCGA | 2383 | −5.79 | −5.79 | −1.35 | −2.92 | −4.80 | −5.79 | 1.61 | 0 |
| 13375-L5-3 | GAGAACCTGAAACCCCAGCCCCTGCCTACCCCTTAG | 2384 | −5.86 | −5.86 | 1.24 | −2.87 | −5.86 | −5.86 | 1.67 | 0 |
| 13396-L5-2 | GACCTGCCCCGCCCCACTCGGGCTCCTTACCG | 2385 | −5.03 | −10.37 | −1.25 | −2.62 | −8.50 | −7.78 | 1.54 | 0 |
| 13431-L5-3 | CGACACCCACTCACTGCCGCTGCCGCACTCACAGC | 2386 | −23.38 | −23.38 | −2.69 | −4.01 | −23.38 | −23.38 | −4.52 | 0 |
| 13432-R5-4 | TTTACAGTTTCTGGCACTTCCTACCACCTCCCCA | 2387 | −5.41 | −5.41 | −1.42 | −1.80 | −5.41 | −5.41 | 2.00 | 1 |
| 13456-R5-2 | CAGATGCCCCGCTATGAAATCTTTTCCAACC | 2388 | −16.80 | −16.80 | −13.79 | −16.80 | −16.80 | −16.80 | −16.80 | 0 |
| 13461-L5-4 | TCCCCAGCCCCGTCCCCACCCCCTAGAGAAAGTGAA | 2389 | −19.96 | −28.08 | −3.31 | −5.34 | −4.75 | −16.77 | −1.67 | 0 |
| 13497-L5-1 | TGTGCCCCCCTCGCTCCCAGCCCCCAGGGGACCGC | 2390 | −7.88 | −20.24 | −4.39 | −3.42 | −3.34 | −3.05 | −1.79 | 0 |
| 227-L5-1 | ACACCTGTCTCTCCCCAGTGCTTCCGCCCCTCA | 2391 | −59.95 | −93.40 | −4.00 | −10.53 | −13.51 | −33.21 | −2.73 | 0 |
| 266-R4-1 | GTCGCCCCCTCCCCCAAGTTGAGACTTGCAGCTAC | 2392 | −6.36 | −14.52 | −1.45 | −2.41 | 1.12 | −3.13 | 1.90 | 0 |
| 266-R5-1 | CCCCTCCCCCAAGTTGAGACTTGCAGCTAC | 2393 | −7.35 | −7.35 | 1.06 | −2.08 | 1.10 | −4.92 | 5.32 | 1 |
| 2819-R5-4 | CAGCCTGCCACCGCCGCTTTTGAAAGAAGCACTTCA | 2394 | −8.56 | −8.56 | 1.00 | −5.87 | −8.56 | −8.56 | −1.66 | 0 |
| 3009-L5-1 | ACCTCGGTCTCCTCCACCAGACTTTAAACTCTC | 2395 | −17.19 | −17.19 | −5.92 | −2.82 | −7.48 | −17.19 | −4.70 | 0 |
| 3009-L5-2 | CCAGTGATACCTCGGTCTCCTCCACCAGACTTT | 2396 | −19.46 | −19.46 | −4.10 | −9.16 | −10.45 | −19.46 | −5.93 | 0 |
| 3009-L5-3 | TGTAATAACCAGTGATACCTCGGTCTCCTCCAC | 2397 | −23.73 | −23.73 | −3.74 | −2.02 | −7.39 | −23.73 | −5.75 | 0 |
| 3249-L4-1 | GCGGAGCCGCCGCCATCCCCGGAGCCGCCGCCGCCGCCG | 2398 | −8.53 | −6.22 | −3.77 | −2.41 | −14.30 | −15.31 | −2.56 | 0 |
| | CC | | | | | | | | | |
| 3249-L5-2 | AGCGGAGCCGCCGCCATCCCCGGAGCCGCCGCCG | 2399 | −94.34 | −18.11 | −4.95 | −2.32 | −23.40 | −29.20 | −2.57 | 0 |
| 3799-R5-1 | CTGAAGATGCTCCCAGAGGCCCCCCGCCGGCC | 2400 | −7.96 | −8.04 | −1.30 | 1.45 | −8.27 | −13.22 | 1.59 | 0 |
| 3897-R5-2 | CCGACCCGCCCGTCAGCCGCCTCCCCCTCAG | 2401 | −11.04 | −14.48 | −1.65 | −2.21 | −3.50 | −5.62 | −1.55 | 0 |
| 3953-R3-2 | ACTCCAGCCTCCGCCGCCTCAGCTTCCCGAGC | 2402 | −34.43 | −52.88 | −3.53 | −4.10 | −15.19 | −24.22 | −5.59 | 0 |
| 3966-L5-1 | ACCCCAGAGCTGTCGCCGCCGCTGCCGCCTTCGCC | 2403 | −12.50 | −9.10 | −4.67 | −3.33 | −12.90 | −27.25 | −3.64 | 0 |
| 4303-R1-1 | AGTGCCCGCTCCTCCGACCTCCCTGCGCACC | 2404 | −16.94 | −16.94 | −1.82 | −7.37 | −13.90 | −16.94 | 1.02 | 0 |
| 4315_C-L4-1 | GCAGCCCCTCCTCCGAGAGGTTGGGGGTCGCGGCCGCCC | 2405 | −10.99 | −17.02 | −1.97 | −1.53 | −1.97 | −2.96 | 1.32 | 0 |
| | GGCCCTCCCGGTCCCCTCCCC | | | | | | | | | |
| 4315_D-R4-1 | GGAAAGTCAGCCCCCAGCGCCCCCCGGAGTTCTTGG | 2406 | −88.80 | −88.80 | −12.25 | −8.23 | −57.77 | −88.80 | −6.18 | 0 |
| 4315_E-R4-1 | CCCCCACCAAACCTATTCCCGCATCCTCCCCGGCTCTGG | 2407 | −7.17 | −8.95 | −1.28 | 1.62 | −3.51 | −8.09 | 2.47 | 1 |
| 4315_F-R4-1 | AACCCGGGCTCCCCCACCCGCTCCCTGAGC | 2408 | −19.29 | −28.54 | −1.97 | −2.12 | −6.85 | −14.36 | −1.32 | 0 |
| 4315_I-L4-1 | ACACCTCTGCGCCCCTCAGGCGCCCTGGGCCTCGGCGCCC | 2409 | −30.88 | −30.88 | −4.30 | −3.56 | −30.88 | −30.88 | −1.71 | 0 |
| | CGCCCGTCCCAG | | | | | | | | | |
| 4315_K-L4-1 | TCCCAGGGGGCCCTGAACTTGTCAAATCCTCGCCATCCTCC | 2410 | −7.44 | −7.44 | 1.35 | −1.81 | −2.45 | −3.94 | 1.80 | 0 |
| | ACCCCCAGCCCCGG | | | | | | | | | |
| 4440-R3-1 | TACTCCCGCCGTTTACCCGCATTTCACTGAA | 2411 | −10.88 | −1.67 | −1.04 | 1.21 | −4.04 | −11.36 | −1.05 | 0 |
| 4479-R3-1 | AGCCCCCTGCCCGGAAATTCAAAACAACTGC | 2412 | −14.50 | −20.12 | −3.55 | −6.32 | −16.37 | −20.12 | −3.97 | 0 |
| 4593-R5-1 | CTATAGCAGATGACATAACTCCCCCGGCATCAG | 2413 | −12.46 | −12.46 | 1.06 | 1.11 | −12.46 | −12.46 | −1.12 | 0 |
| 4829-R2-1 | TCCCTTTGTGCTGCCCGAGTGCCTTCCCCCTG | 2414 | −9.27 | −9.27 | 2.07 | −1.01 | −3.71 | −2.66 | 6.01 | 2 |
| 4855-R5-2 | GGGCTGCCGGGTCTCCCGCTTCCCCCTCCTGC | 2415 | −10.65 | −15.12 | 1.25 | 1.03 | 1.70 | −1.51 | 1.72 | 0 |
| 4884-R5-1 | TCCCCAGTCTCCCTGTTTCAGCACCTGCCTCA | 2416 | −17.58 | −17.58 | −1.81 | −2.95 | −7.44 | −9.96 | 1.51 | 0 |
| 4988-R4-1 | CTCCTCCTCCCCGTCTTTGGATACCAAACACTGGAC | 2417 | −5.47 | −5.47 | 1.61 | −1.61 | −1.44 | −5.47 | 3.51 | 1 |
| 4988-R5-2 | CTCCTCCTCCCCGTCTTTGGATACCAAACAC | 2418 | −9.43 | −9.43 | 1.16 | −2.18 | −1.17 | −9.43 | 4.95 | 1 |
| 5071-R5-1 | CGCCCCAGTCCCAGCCCAATTAATAAATGGG | 2419 | −6.09 | −6.09 | 1.41 | 2.38 | −6.09 | −6.09 | 1.59 | 0 |
| 5071-R5-2 | GACCCCCGCCCCAGTCCCAGCCCAATTAATA | 2420 | −24.30 | −13.23 | −2.97 | −3.00 | −5.08 | −18.13 | −1.48 | 0 |
| 5640-L3-1 | GCCATGGAACACCGTGCCTGCCCCTCTCGAGA | 2421 | −22.57 | −22.57 | −3.86 | −4.16 | −22.57 | −22.57 | −1.57 | 0 |
| 5707-L5-2 | TCACCATGCGGCCCCGGTGGTCTTCACACAGCA | 2422 | −17.42 | −17.42 | −17.42 | −17.42 | −17.42 | −17.42 | −17.42 | 0 |
| 6198-R5-2 | GCCGCCGCCGCCGCGTCTTCCCGCGAAGCCT | 2423 | −8.01 | −10.31 | −4.02 | −2.44 | −21.45 | −23.60 | −3.04 | 0 |
| 6216-R5-2 | CATAGTTACTCCCGCCGTTTACCCGTGCTTC | 2424 | −15.09 | −10.39 | −1.12 | 1.09 | −5.30 | −18.03 | −1.30 | 0 |
| 6825-R5-1 | TCCTTCTGCTCAGCTGTTCCCGGTGCCAG | 2425 | −28.95 | −28.95 | −21.84 | −14.99 | −28.95 | −28.95 | −6.06 | 0 |
| 6880-L3-2 | ACCTCCCCCGCGAAGACATCCACATTCTGCA | 2426 | −20.08 | −29.17 | −1.83 | −9.68 | −3.55 | −29.17 | −3.36 | 0 |
| 7061-R5-2 | TCATGGAAACCCCACCCTTCCCATGCCCAACC | 2427 | −5.94 | −5.94 | −1.04 | −4.28 | −5.94 | −5.94 | 1.37 | 0 |
| 7126-L3-1 | GCACACCCGCTCTCCGGCCCGCGCCCCTG | 2428 | −25.95 | −6.91 | −4.10 | −2.74 | −11.10 | −14.35 | −2.85 | 0 |
| 7356_A-R4-1 | CAGAGCCCGCTCTCGCGACCGACCTGCCGCCGACCGCCAC | 2429 | −18.01 | −26.53 | −3.41 | −4.02 | −22.46 | −25.26 | −3.07 | 0 |
| | AG | | | | | | | | | |
| 7702-L2-1 | CCCAGAGAACCGGAATTCCTCCCCGCCCC | 2430 | −5.27 | −5.27 | −1.83 | −2.91 | −4.35 | −5.27 | 2.04 | 1 |
| 7824-R5-1 | TGCCAGCTTCATCGCCGCCTCACACACACA | 2431 | −8.78 | −8.78 | −2.70 | −8.78 | −8.78 | −8.78 | −3.37 | 0 |
| 7949-R5-1 | GATGCGCGCGCCGACCGCCGCCAGCTGCAATTCATAC | 2432 | −24.23 | −24.23 | −3.02 | −1.84 | −24.23 | −24.23 | −2.16 | 0 |
| 8016-L3-1 | TCAGCGCAACAAGCCCCGCAGTCACCCCTCT | 2433 | −54.19 | −54.19 | −16.08 | −20.80 | −54.19 | −54.19 | −6.74 | 0 |
| 8250-R5-2 | CCGACCCGCCCGTCAGCCGCCTCTCCCTCAG | 2434 | −17.68 | −16.09 | −1.77 | −1.62 | −3.89 | −4.78 | 1.33 | 0 |
| 8394-L5-1 | CCGCCCTGCCCATCTCCGACTATCCCTGGCCCC | 2435 | −7.06 | −7.06 | 1.08 | −1.28 | −7.06 | −7.06 | 2.40 | 1 |
| 8898-R5-1 | CAGCCGAGGCGGACGCCCGCTCCCGCCACCATG | 2436 | −10.42 | −15.12 | −2.07 | −1.34 | −12.35 | −15.12 | −1.31 | 0 |
| 9053-R3-1 | TTCTTGCCCTCCAATCCCCGGGCTCCACCAGCC | 2437 | −10.59 | −10.59 | −1.97 | −1.65 | −8.41 | −10.59 | −2.27 | 0 |
| 9387-R2-2 | TCCATCCTTGCCGTCGCCTTCATCTCAAAGCCATC | 2438 | −8.80 | −8.80 | −1.47 | −8.80 | −8.80 | −8.80 | −3.48 | 0 |
| 9691-L5-1 | CATTTCATCCGCATCTCCCTCTTGGCCCCTTGC | 2439 | −8.33 | −8.33 | −2.45 | −6.14 | −8.33 | −8.33 | 1.53 | 0 |
| 9774-R2-2 | CCGCCCCCTCACCGCCTCCTGCTCCCATCAGGC | 2440 | −7.93 | −16.14 | −1.34 | −2.55 | −4.83 | −3.47 | 1.40 | 0 |
| miR-1228* | CACACACCTGCCCCCGCCCAC | 2441 | −15.38 | −12.90 | −2.54 | −1.74 | −4.13 | −8.82 | −1.45 | 0 |
| miR-1275 | GACAGCCTCTCCCCCAC | 2442 | −8.09 | −8.09 | 2.33 | −1.30 | −2.96 | −8.09 | 2.04 | 2 |
| miR-1308 | CCACTGAACCACCCATGC | 2443 | −18.92 | −18.92 | −5.22 | −18.92 | −4.03 | −18.92 | −5.64 | 0 |
| miR-21 | TCAACATCAGTCTGATAAGCTA | 2444 | −1.68 | −23.57 | −19.14 | −23.57 | 1.39 | −7.45 | −2.50 | 0 |
| miR-373* | GGAAAGCGCCCCCATTTTGAGT | 2445 | −48.87 | −48.87 | −48.87 | −48.87 | −48.87 | −48.87 | −21.32 | 0 |
| miR-423-5p | AAAGTCTCGCTCTCTGCCCCTCA | 2446 | −9.88 | −4.20 | −6.30 | −4.12 | −7.70 | −16.50 | −3.64 | 0 |
| miR-486-3p | ATCCTGTACTGAGCTGCCCCG | 2447 | −40.84 | −40.84 | −36.13 | −40.84 | −40.84 | −40.84 | −7.70 | 0 |
| miR-612 | AAGGAGCTCAGAAGCCCTGCCCAGC | 2448 | −5.79 | −5.79 | −3.09 | −2.94 | −5.79 | −5.79 | −1.13 | 0 |
| miR-638 | AGGCCGCCACCCGCCCGCGATCCCT | 2449 | −11.00 | −23.12 | −2.25 | −1.89 | −19.12 | −23.12 | −1.53 | 0 |
| miR-663 | GCGGTCCCGCGGCGCCCCGCCT | 2450 | −45.02 | −45.02 | −10.68 | −32.17 | −45.02 | −45.02 | −11.52 | 0 |
| miR-744 | TGCTGTTAGCCCTAGCCCCGCA | 2451 | −37.67 | −37.67 | −10.59 | −19.87 | −37.67 | −37.67 | −4.41 | 0 |
| miR-923 | AGTTTCTTTTCCTCCGCTGAC | 2452 | −3.90 | −3.72 | 1.48 | 1.30 | −6.06 | −8.95 | 2.30 | 1 |

TABLE 31
Pre-microRNA sequences and chromosomal locations of target RNAs in Table 30

| Gene Down | Chrom | | |
|---|---|---|---|
| expressed in Cell lines | loc'n | Pre-microRNA sequence | SEQ ID NO |
| 10010_B-L4-1 | 7q32.1 | GGGCAGCGCCCCTCCTTCCGGAGGGCAGCATCCCGGCGGGGGCGGGGGCTCGGCTTTGATGCCAGGGCACCTTTTGTCCCTGGAGACGCTC | 2453 |
| | | TGCCAGCCAGGTGCGTGGAGGGAGTGCAGCCC | |
| 10010_D-L4-1 | 7q32.1 | CAGGTGAGAGGCTGAGCCCCGGGCGGGGGAGGGCGCCAGGCCTGGGGCATTAACCGTCCCGGGGACCCTTTTGGCCTG | 2454 |
| 10138-L2-1 | 17q22 | ACTTTTTCTGGTGGGAGGGGAGAGCGGAGCAGGCTCACGTGTAACCGCGCAGGAGCCTCCTCTGGCTTGAGCCCTTTCTTGGTAAGT | 2455 |
| 10231-R3-1 | 9p11.2 | GGCGGCTGCGGAGGCTGGCGCGGGCTGCTGCACCTTTAACGCTTTCTGGCGCTGACAGGCGGCGGCCCAGCTAAAGTTCACAGCGCC | 2456 |
| 10242-R5-1 | 22q13.2 | GGCAGGAAGGCCTCCGGCTTCACAAAGTGGCCCTGGGCATCCAGGAAGTGTTCGGGGTGGAAGCGGAAGGGCTTCTTCC | 2457 |
| 10342-R2-2 | 19q12 | CCCACGCACGGAGGGTCGCCAGGAAAGTGGACATTACCGCTTTAATTAACTTCGAGATGCTCCGGCGGCGGG | 2458 |
| 11370-L4-1, 11370- | 12q13.2 | GTCCAGTTCTCAGGGGACAATACTGATGGCAGCCAAACTGGGCAAGGATGCAGTGTGGGGGCGGAGGGGGCATGACCTCTATTCAA | 2459 |
| L5-5 | | GTTCTGTGTCTTGGCCCCTGGCTGAGGTATTGAGTGTGAGGAAGGGAACACTGGGC | |
| 12223-L4-1 | 4q27 | TAGAGGGAGAAGAAACAACTCTGTCTGATGTCTTCTGGGATGGCCTTAATACAGATAGCATTGTCTCTTCCATTTCTG | 2460 |
| 12691-R5-1 | 1q22 | CCCACGCGTCGCGCGCTCCCGACCGGAGCGGGACGGGGCCTGTCGGGGGCGCGCCAGGGGCGGGG | 2461 |
| 12692-L5-1 | 1q22 | GCGCGGTGGCCGGGTGCTGGCTGCGGGGCCGGGTCCTCATTCTGCTCAGTCCTTGCTGCCCTTGTCTTCTCCTCCCCGCCAAGCCG | 2462 |
| | | CCGTGT | |
| 12693-L5-1 | 1q22 | GGGGAGGGGACCGGGAGGGCCGGGCGGCCGCGACCCCCAACCTCTCGGAGGAGGGGCTGCCGCTCGCCGCTCCGCTCTTTGTTG | 2463 |
| | | TTTGGGGCTCCGCGCCTCCCCCTCTCTCCCTCCTC | |
| 12694-R5-1 | 1q22 | GGGGACGTGGCCCCTCCCCCCCGGAGCGGGACTCCAAGAACTCCGGGGGGCGCTGGGGGCTGACTTTCC | 2464 |
| 12695-R5-1 | 1q22 | TCCCCGCCACCCTTGGAGCACCTCAGCGTTCTTAGGGGAAGCCAGAGCCGGGGAGGATGCGGGAATAGGTTTGGTGGGGG | 2465 |
| 12696-R5-1, | 1q22 | GATCAGGTTCCCCTCCCCCGCATACACCTGGGCGCAGGTGAAAGCTCAGGGAGCGGGTGGGGGAGCCCGGGTT | 2466 |
| 12696-R5-2 | | | |
| 12697-R5-1 | 1q22 | CGGGAGCCTCCTTTCTGTCCTCTCTACTCCGTGCGGGCCTGGGCCGGCAGAGGTAGGAGGGGGCGCACACCGGGCCAGGAGGCTG | 2467 |
| | | CC | |
| 12699-L5-1 | 1q22 | CTGGGACGGGCGGGGCGCCGAGGCCCAGGGCGCCTGAGGGGCGCAGAGGTGTCAGCGTGCAACCGCCGCCCCCCAGCGTTCCC | 2468 |
| | | GCCACCACCGCCACCACCCTCAAAGCCCGG | |
| 12701-L5-1 | 1q22 | CCGGGGCTGGGGGTGGAGGATGGCGAGGATTTGACAAGTTCAGGGCCCCCTGGGATCCTTTCCCTACTCCCTGGTCTTGTTGGACA | 2469 |
| | | CCCTGTTTACCTGCCCTAATTGCCCCGG | |
| 12703-L5-3 | 7q32.1 | GGGCAGCGCCCCTCCTTCCGGAGGGCAGCATCCCGGCGGGGGCGGGGGCTCGGCTTTGATGCCAGGGCACCTTTTGTCCCTGGAG | 2470 |
| | | ACGCTCTGCCAGCCAGGTGCGTGGAGGGAGTGCAGCCC | |
| 12704-L5-1, 12704- | 7q32.1 | CAGGTGAGAGGCTGAGCCCCGGGCGGGGGAGGGCGCCAGGCCTGGGGCATTAACCGTCCCGGGGACCCTTTTGGCCTG | 2471 |
| L5-2 | | | |
| 12713-R5-1 | 8q24.3 | CGGAGGTCGCTCGCTCGCTCGCTCGGCTCGCTGACTCGCCGGAGCGCTCTGTGGCGGTCGGCGGCAGGTCGGTCGCGAGAGCGG | 2472 |
| | | GCTCTG | |
| 12722-L5-1 | 13q31.3 | GCGGGCGGGCGGGGAGGTCGGAAGTACTTTGTTTTTTATGCTAATGAGGGAGTGGGGCTTGTCCGTATTTACGTTGAGGCGGGAGC | 2473 |
| | | CGCCGCCCTTCATTCACCCACATGGTCCTTCGAGGTGCCGCCGCCGCCGCCCGACCTGC | |
| 13004-R5-1 | 12q13.2 | CCTTGACTTCCCTTTCTTCTCACTTCGGACTGCTCACTTGCCTTGTTCAGCCCTGAATCATCAGGTGAAGGGAGCGAGAATTGCGGGG | 2474 |
| | | GTTGGAGTTAGGTAGAGGGATTTAAGG | |
| 13006-R5-4 | 12q21.1 | CCCTAACTTCCCTCTCTACACCCTCGCTCTTCCCACCGCTCCCGTCCTTCTCCCTAGCCGAGAACCGGTTGGAAGGCTCCCGCGGAA | 2475 |
| | | AGCGAGGCGAGAGCGCGGCGCAGGGGAGGGAGAGCCGGG | |
| 13044-L5-3, 13044- | 10q21.3 | CTGCAGCTAAGAGGGGTGTGATGAAAGCAAAGAAAGGGACAGCTGGGATGGGAGAAGCCCTGGGGGGAGCAGGGAGGCTCCCACA | 2476 |
| L5-4 | | TGTTGTACCCTCCGGTAACACTCAGGCCCTGGACAGTCAGCAG | |
| 13047-R5-2 | 10q26.3 | ACCTCAGTGTTGATAGCAGATCTCATTATAGTCGGTGCATTTGGCTACCGACCTGCAGCCAGCAGTGCCCGGGGCTAGTGCATGGGG | 2477 |
| | | TCTGCTGTGCCACTGTGGT | |
| 13052-L5-1 | 19q13.33 | GGTTGGCGGGTGGGGGAGATGCTTAGGTCCGGGGAATCTCTGAGATTCTCGGCTTCCCCTCTCCCCTCACCCTCCTCCTCAGGCCC | 2478 |
| | | CAGGCAGCCCCGGGGCATGCTGGGAACCCAGGCCTGGGCTCCGGGCCAGG | |
| 13093-L5-2 | 11q13.1 | CTGACTTCTGCGCGGGGCGCGGTGGGGTTCTGCGGGGTCGGAAAGACTCCCCAGATCCCCGCGCGGCCCCAGACCCAG | 2479 |
| 13097-L5-2 | 11q23.3 | GTGGACAACCCTAGGGTGGGGCTGGAGGTGGGGCTGAGGCTGAGTCTTCCTCCCCTTCCTCCCTGCCCAGGGGTCCAC | 2480 |
| 13106-R5-1, | 14q11.2 | TGGCTCTAGGCCACCCTGGCAGCTGGGCCGCACTCTGCCGGCCTGGACGCCGGGGTCGGCCTCTGATTGGTCCA | 2481 |
| 13106-R5-2 | | | |
| 13111-L5-3 | 16p13.3 | AGCCTGTGGGAAAGAGAAGAGCAGGGCAGGGTGAAGGCCCGGCGGAGACACTCTGCCCACCCCACACCCTGCCTATGGGCCACAC | 2482 |
| | | AGCT | |
| 13119-R5-2 | 17q21.32 | TCTCCGTGCACGCTGCTGACCGGCTCGGCGACTGCCTCCCTGCTGTGAGCAGGAGAACAGGAAGTCTGCCCGACAGGGAGGTGGC | 2483 |
| | | CGGGCGGGAGCGGCAGAGTCGGCGTTGAGA | |
| 13129-L5-2, 13129- | 20q13.33 | TGGCGCTGCTCTGCTGTTCCTCTGTCTCCCAGACTCTGGGTGGATGGAGCAGGTCGGGGGCCAGGGGACAGGAAGGCTAGGGCC | 2484 |
| L5-3 | | | |
| 13129-L5-2, 13129- | 20q13.33 | CCAGACTCTGGGTGGATGGAGCAGGTCGGGGGCCAGGGGACAGGAAGGCTAGGGCCCCAGAGACCTGTCCTGGGCCCCATGTCCA | 2485 |
| L5-3 | | GCTCTGCCCTTAGTGCTTGG | |
| 13130-L5-1, 13130- | 19p13.3 | CCAAGCAGCTTATCGAGGAAAAGATCGAGGTGGGTTGGGGCGGGCTCTGGGGATTTGGTCTCACAGCCCGGATCCCAGCCCACTTA | 2486 |
| L5-2 | | CCTTGGTTACTCTCCTTCCTTCTAGGG | |
| 13137-L5-1 | 5p15.2 | GGCATGGGGAGGTGGGGTTGCGGGGGTTAGAGCTGTGGGTGATCAGAAGGGAAGGGCTTCATTTCTACGCTCTGCCTCCGCTACCT | 2487 |
| | | CTTCCCCACCACCCCTAATCCC | |
| 13138-R5-1 | 5q22.3 | ATCCGTCGCAGCAGTCGCTGCAGCCGCTGCAGTCCGAGCCGACTAAGGGCGGGAGGCAGCTCGGGTGGCGGGGCGTGGCGAACA | 2488 |
| | | GCGCGGCCGGAT | |
| 13161-L5-4 | 8p21.3 | GGGAGAGAAGGGGCGACGAGATCACCAGAGGGGACTGACACGCGGACCCTGGCGGAACCCCACCCCCTTGCTTTCCGGTCCCCCA | 2489 |
| | | GTCGGTGCGTCCCTCCAGTGGCCTCTCAGCTCCTCCCCTCCC | |
| 13209-R5-3 | 10q22.1 | GGGAGCCGCCGGCGGGCAGGCCGCCGGGGCAGCAGGCGAGTTACCTCAACTCCCGGCCGCTCCGGAGGTTGCCGGGCACCGAG | 2490 |
| | | GAGCCGCCGTGCCCTTCAGGCGCCTGCGGCGGCGACCA | |
| 13211-L5-1 | 10q23.1 | GCGCCTCCGGTCGGTCAGAGAGCGGCGGGGCGCGTCTGCAGCCCTCCAAGCCGCCTCCTGCGCGCCGGGTCCCCGCGCCCGCTG | 2491 |
| | | CTGCTGCTGCTGCCCGCCGCCTGCGTGC | |
| 13227-L5-1, 13227- | 11q25 | AAGCAAGACACCGAGGTGGGAAGGGGGACGAGGAGGACTGGGCCCTATTTCTCCCATCTATGTAAAGGGAGGGATATCAGGGAAGT | 2492 |
| L5-2 | | CTCTGTCTGTGTACTCAAGTTTGGGATGCT | |
| 13229-L5-1, 13229- | 11p15.5 | TGCTGGCCCAAGGGGTAAAGGGGCAGGGACGGGTGGCCCCAGGAAGAAGGGCCTGGTGGAGCCGCTCTTCTCCCTGCCCACAGAG | 2493 |
| L5-2, 13229-R5-3 | | ACTGGCGGAGCTGC | |
| 13239-L5-2 | 1q23.3 | CTGAGGACAGGGGTAAGTCTGGGGAGATGGGGGGAGCTCTGCTGAGGGTGCACAAGGCCCTGGCTCTACACACATCCCTGTCTTAC | 2494 |
| | | AGAG | |
| 13240-L5-2 | 11q12.2 | GCAGTGTGATTTGGGGCCGGGAATGCCGCGGCGGGGACGGCGATTGGTCCGTATGTGTGGTGCCACCGGCCGCCGGCTCCGCCC | 2495 |
| | | CGGCCCCCGCCCCACACGCCGCAT | |
| 13247-L5-3 | 1q24.2 | ATCTCACAGAGGAAGAACAGGGCTCTGAGGTCGGGAGGGGAAGGCGGCTCAGGACTTCTGGCTCCAGAGCCTCCTCTCCTTCCACC | 2496 |
| | | ATAGTGCCTGCTCCAGAGGAGAC | |
| 13267-L5-1 | 1q42.13 | CACCATAGGTGAGGTGGGGGCCAGCAGGGAGTGGGCTGGGCTGGGCTGGGCCAAGGTACAAGGCCTCACCCTGCATCCCGCACCC | 2497 |
| | | AGGCTTCAACGTGG | |
| 13276-L5-4 | 12q13.13 | GTGCTTTCTTGTCCAAGCAGTTGATGAAGGCAGGTGGGGTGGGAGCAGCCACAATGGGGGCTCTGCTGACCATCTGCCCTTCCACC | 2498 |
| | | CTACAGCACCCGGCGACAGGACACCAGGT | |
| 13281-L5-3 | 12p13.31 | GCCGCCCCCACCCTGTCCCTCGTCACTTCCTCTGTCCTGTGGGGTGGGGGTGCAGGCGCTTCTCCTTTAGCTGTGCCGCACTTCTCC | 2499 |
| | | CTACAGGCCAGGAGAAACAGAACACCGTGTGCAC | |
| 13283-L5-3 | 1p36.11 | GGGCACGGGGGTTGGGTGTGCAAAGGGTGGCAGCAAGGAAGGCAGGGGTCCTAAGGTGTGTCCTCCTGCCCTCCTTGCTGTAGAC | 2500 |
| | | TTTGGCCTGAGCAAAGAGGCC | |
| 13285-L5-3 | 1p36.32 | CTGGGGGTGACCCCGTGCAGGGGCTGAGCTGGGCGGCTGGGTGCATAGCCCATCTGTAGCCTAAGCAATGGTGCAAAGCCCCCAC | 2501 |
| | | GCCTTGGTTTCCTCTCCTGAACGCGGGCACACAGAG | |
| 13289-L5-3 | 1p35.1 | TGCTTGGAGTGGCAGAGGGCAGAGGGGCCATGGGAGGCAAACTTTGAGCGTGTCTCAGGAGCCTAAAACATGAGAAGCCTCAGTTT | 2502 |
| | | CCCTCTCCTAGACCATCTGCTTATCCTCTCCAGGC | |
| 13291-L5-2 | 1p34.3 | CGGGAGGGAAGGAGGGAGGAAGGGGCGCTTGGGCAGAACCAAGGGTGGCAGATTATCCTAGGGACTCTTGGGGCAGAACCAGACG | 2503 |
| | | CCTCTGCGTCCTCCCCTCTCCCC | |
| 13312-L5-2 | 15q24.1 | GTGAGTGGGGCTGGGCTGTGGGGGAGGGGTGGGGTGGCAGGGAACAGGCAGACCATCCCTTCTACCCACAGGATCCTGCTGCTGC | 2504 |
| | | AGACAG | |
| 13325-R5-1, | 16q24.3 | ACTCAGGCACTGCCTCTGACGATGCTCTCCCAGATCTGGTACGCTCATGGGGAAGAGCCCAGCGCCAGGCAGTGTTGGA | 2505 |
| 13325-R5-2 | | | |
| 13326-L5-1, 13326- | 17p12 | TGCCATCGAAGGGCGGGTGGGGGGAAGCCGGAATCTCTGTCCACATGCTCCAGGCACCTAGCTGCTCTGAGGGGCAGAGAGCAGA | 2506 |
| L5-2 | | GGTGGTGCTCCCCCCCATCAGCATTTTGAGTTGGCT | |
| 13343-L5-1 | 17q25.3 | TGAGGGGGAGGGGCGCTGCGGGAGGGGTGGAGGGCCCAGGGAAGGGTGAGGGGCCGGGAGCCACTCTGCCCGGCACTCTCCGC | 2507 |
| | | CCAGAAACAGCCCAACGCCCCTTTCTTTCCCCTTT | |
| 13349-L5-1, 13349- | 18q23 | AGAGGAAGGAGGCGGCTGGGATAGCCCACACAGGTGGTGGGAGTCTGTCCTCTCCCTGCCAGGGTGCAGGACAGCAGGTCTCAAT | 2508 |
| L5-2 | | CTCGCCCAGTGGGACTCAGTGGTCCCTCATTCA | |
| 13365-L5-3 | 19p13.3 | CCAAGCAGCTTATCGAGGAAAAGATCGAGGTGGGTTGGGGCGGGCTCTGGGGATTTGGTCTCACAGCCCGGATCCCAGCCCACTTA | 2509 |
| | | CCTTGGTTACTCTCCTTCCTTCTAGGG | |
| 13365-L5-3 | 19p13.3 | GAGGAAAAGATCGAGGTGGGTTGGGGCGGGCTCTGGGGATTTGGTCTCACAGCCCGGATCCCAGCCCACTTACCTTGGTTACTCTC | 2510 |
| | | CTT | |
| 13374-R5-1, | 20q13.33 | TGGCGCTGCTCTGCTGTTCCTCTGTCTCCCAGACTCTGGGTGGATGGAGCAGGTCGGGGGCCAGGGGACAGGAAGGCTAGGGCC | 2511 |
| 13374-R5-2 | | | |
| 13374-R5-1, | 20q13.33 | CCAGACTCTGGGTGGATGGAGCAGGTCGGGGGCCAGGGGACAGGAAGGCTAGGGCCCCAGAGACCTGTCCTGGGCCCCATGTCCA | 2512 |
| 13374-R5-2 | | GCTCTGCCCTTAGTGCTTGG | |
| 13375-L5-3 | 20q13.33 | ACCCTCTCAGGACCCCTCCTAAGGGGTAGGCAGGGGCTGGGGTTTCAGGTTCTCAGTCAGAACCTTGGCCCCTCTCCCCAGACCCC | 2513 |
| | | CAGGCTGTGGTGAGGGTCTGAGAGCTGGTAC | |
| 13396-L5-2 | 22q11.21 | GGGACAGCGGTAAGGAGCCCGAGTGGGGCGGGGCAGGTCCCTGCAGGGACTGTGACACTGAAGGACCTGCACCTTCGCCCACAGA | 2514 |
| | | AAGACTCCTAGCCAGGAGGGCCTGC | |
| 13431-L5-3 | 3p21.31 | GCCTCTTCCTGTCTCTGCTGTGAGTGCGGCAGCGGCAGTGAGTGGGTGTCGACGCGGCGGAATGCCCGTCGCTGCTGCTGCTGCT | 2515 |
| | | GCCCGACGGGCCTGGGG | |
| 13432-R5-4 | 3p14.2 | TGCTTTCTGCATTCTTCTCCCTCCCCGGTCTCTTGTGACAAGCCATACTGTTAAATATCAGAATAGTAGGTGATTACGTGGAGTTTGGG | 2516 |
| | | GAGGTGGTAGGAAGTGCCAGAAACTGTAAA | |
| 13456-R5-2 | 4q12 | CCAGGAGCTACCAAGCAGAGGTTTATTCAGTCTCCAGAAGGCTATGCAGGTTGGAAAAGATTTCATAGCGGGGCATCTG | 2517 |
| 13461-L5-4 | 5p15.33 | TCCGGGAATCTGGAGGTTTCTAGCACTTTCACTTTCTCTAGGGGGTGGGGACGGGGCTGGGGAGAGAATCCCCCAGCCCTGTTCCC | 2518 |
| | | TCCATCCTGGCTCCAAATCCCAGTTACTCCCCGGA | |
| 13497-L5-1 | 7q22.1 | GCGGTCCCCTGGGGGCTGGGAGCGAGGGGGGCACAGATCTGATGTGCCCCCCACCCTCTCACAGGACTGG | 2519 |
| 227-L5-1 | 3q27.2 | TGAGGGGCGGAAGCACTGGGGAGAGACAGGTGTGAGCTTCCCACGTGGTGATCAGCTCACACCTGTCTTGTGTTCTTGGTATTCACA | 2520 |
| | | GACTCTCA | |
| 266-R4-1, 266-R5-1 | 12q14.3 | GTTGCTATTTCCCTCAGTTGAGGGCGAAGTTAGCAAATCCGTAGCTGCAAGTCTCAACTTGGGGGAGGGGGCGAC | 2521 |
| 2819-R5-4 | 15q22.2 | AATGCCAGTGAGTTTGAAAGGCACTTTGTCCAATTAGAAGTGTGGAGAAATATTCATCCTGTCCATGACAAAGATGAAGTGCTTCTTTC | 2522 |
| | | AAAAGCGGCGGTGGCAGGCTG | |
| 3009-L5-1, 3009- | 8q24.3 | GAGAGTTTAAAGTCTGGTGGAGGAGACCGAGGTATCACTGGTTATTACAATACAGTGAGCCCCACATTGGAAAGACCAGCCACGCTC | 2523 |
| L5-2, 3009-L5-3 | | TTGGTCTCCGTCCCCATAACTCTC | |
| 3249-L4-1, 3249- | 1q22 | GGCGGCGGCGGCGGCGGCTCCGGGGATGGCGGCGGCTCCGCTGCTGCTGCTGCTGCTGCTCGTGCCCGTGCCGCTGCTGCCGCT | 2524 |
| L5-2 | | GCT | |
| 3799-R5-1 | 11q13.1 | GAATTTGCCCTACGGTGTGACCCCAGCCTCTCCCTCTGGCCACAGCCAGGGCCGGCGGGGGGCCTCTGGGAGCATCTTCAGCAAGT | 2525 |
| | | TC | |
| 3897-R5-2 | 9q12, 9p11.2 | CGGAGCCGCCCGCGCCAGCCTCTCCATCTCGCAAGTTTTAATTAACGCTGAGGGGGAGGCGGCTGACGGGCGGGTCGG | 2526 |
| 3953-R3-2 | 9q33.3 | GCTCCTGCTCCGCCGCGGGAGCTGCTCCGGCGGCCGCAGGGCTCGCTCGGGAAGCTGAGGCGGCGGAGGCTGGAGT | 2527 |
| 3966-L5-1 | 3q27.2 | GGCGAAGGCGGCAGCGGCGGCGACAGCTCTGGGGTTTGCGTCTCGGGGTGTGTCGGCCGCCGCTGCTGCTTGGGCC | 2528 |
| 4303-R1-1 | 22q11.21 | GGCTGGCCAGGCTCCGCCCCCGGCCCTCCCTGCGCCCGGCCGGTGCGCAGGGAGGTCGGAGGAGCGGGCACTGCCCACCC | 2529 |
| 4315_C-L4-1 | 1q22 | GGGGAGGGGACCGGGAGGGCCGGGCGGCCGCGACCCCCAACCTCTCGGAGGAGGGGCTGCCGCTCGCCGCTCCGCTCTTTGTTG | 2530 |
| | | TTTGGGGCTCCGCGCCTCCCCCTCTCTCCCTCCTC | |
| 4315_D-R4-1 | 1q22 | GGGGACGTGGCCCCTCCCCCCCGGAGCGGGACTCCAAGAACTCCGGGGGGCGCTGGGGGCTGACTTTCC | 2531 |
| 4315_E-R4-1 | 1q22 | TCCCCGCCACCCTTGGAGCACCTCAGCGTTCTTAGGGGAAGCCAGAGCCGGGGAGGATGCGGGAATAGGTTTGGTGGGGG | 2532 |
| 4315_F-R4-1 | 1q22 | GATCAGGTTCCCCTCCCCCGCATACACCTGGGCGCAGGTGAAAGCTCAGGGAGCGGGTGGGGGAGCCCGGGTT | 2533 |
| 4315_I-L4-1 | 1q22 | CTGGGACGGGCGGGGCGCCGAGGCCCAGGGCGCCTGAGGGGCGCAGAGGTGTCAGCGTGCAACCGCCGCCCCCCAGCGTTCCC | 2534 |
| | | GCCACCACCGCCACCACCCTCAAAGCCCGG | |
| 4315_K-L4-1 | 1q22 | CCGGGGCTGGGGGTGGAGGATGGCGAGGATTTGACAAGTTCAGGGCCCCCTGGGATCCTTTCCCTACTCCCTGGTCTTGTTGGACA | 2535 |
| | | CCCTGTTTACCTGCCCTAATTGCCCCGG | |
| 4440-R3-1 | 7q11.22 | GTGATGTGATTTCTGCCCAGTGCTCTGAATGTCAAACTGAAGAAATTCAGTGAAATGCGGGTAAACGGCGGGAGTAACTATGAC | 2536 |
| 4479-R3-1 | 1p32.3 | CCCAAGCTCCTTCCTGGAGGACTTAACACTGTGTTGAGCAGTTGTTTTGAATTTCCGGGCAGGGGGCTGCAAAAGGG | 2537 |
| 4593-R5-1 | 15q23 | CAATCAATTAGCACATGAGTAATACCAAGCCCATTAGGACAAACTGATGCCGGGGGAGTTATGTCATCTGCTATAGAAATGATTG | 2538 |
| 4829-R2-1 | 1q21.3 | GGTGTGTCTGCCTCTCTTTCTGCCCCCCTATACCCCTTGACCCCAGGGGGAAGGCACTCGGGCAGCACAAAGGGAGCAGATGCCC | 2539 |
| 4855-R5-2 | 12q13.11 | GGGTCCGGGTCTCTACCGCGCCCTCATGCAGGAGGCCCTTGGAGCAGGAGGGGGAAGCGGGAGACCCGGCAGCCC | 2540 |
| 4884-R5-1 | 17q11.2 | TCCACAGCTCCATAAATGTTTAATGCCACCGGCTGGGCAGGAATGAGGCAGGTGCTGAAACAGGGAGACTGGGGA | 2541 |
| 4988-R4-1, 4988- | 14q24.3 | CTTTTTCTCTCTGCTGGGAAACCTTGCTTGACTTCATGTCCAGTGTTTGGTATCCAAAGACGGGGAGGAGGAG | 2542 |
| R5-2 | | | |
| 5071-R5-1, 5071- | 17q12 | GATTCCTGCTCCCAGAGCCATAAAGTGGGAGCCCCCATTTATTAATTGGGCTGGGACTGGGGCGGGGGTC | 2543 |
| R5-2 | | | |
| 5640-L3-1 | 1p34.1 | TCTCGAGAGGGGCAGGCACGGTGTTCCATGGCAAGACGGCGGTTGATGTATAGGCGTGGCATGAAGCTGGGCTTGCTGCTCTCAGA | 2544 |
| 5707-L5-2 | 9q34.3 | GCTCCTCGTGCTGTGTGAAGACCACCGGGGCCGCATGGTGAAGCACCAGTGCTGTCCTGGCTGTGGCTACTTCTGCACAGCGGTAA | 2545 |
| | | GAGC | |
| 6198-R5-2 | 1q25.3 | GCCGCCAGCACCCGCGGTGCCGCGGGGCCGCTCCGAGGAGCCTGAGAGACCCACGGAGGCTTCGCGGGAAGACGCGGCGGCGG | 2546 |
| | | CGGC | |
| 6216-R5-2 | 11q14.1 | CATGTGATTTCTGCCCAGTGCTCTGAATGTCAAAGTGAAGAAATTCAATGAAGCACGGGTAAACGGCGGGAGTAACTATG | 2547 |
| 6825-R5-1 | 9q31.3 | CAAATTACATCTGTTTATGCTTCTATTTGTTAGACAATCTGGCACCGGGAACAGCTGAGCAGAAGGATTTG | 2548 |
| 6880-L3-2 | 1q42.13 | GGCTTGCAGAATGTGGATGTCTTCGCGGGGGAGGTGGCCACGTTCTCCTGTGAGGTGTCTCACGCGGGTGGGCC | 2549 |
| 7061-R5-2 | 1p13.3 | TCATGGCAGCGACCCACCTCCAGTCCCCTGGACAATCGGGTACAAGAGACTTAAGGTTGGGCATGGGAAGGGTGGGGTTTCCATGA | 2550 |
| 7126-L3-1 | 5q31.1 | CAGGGGCGCGGGCCGGAGAGCGGGTGTGCAAAGTGGGCGCAGGGCCCTGGGGCCGCGCCCCTTGCTCTGCCGGCTCGACTCTTG | 2551 |
| 7356_A-R4-1 | 8q24.3 | CGGAGGTCGCTCGCTCGCTCGCTCGGCTCGCTGACTCGCCGGAGCGCTCTGTGGCGGTCGGCGGCAGGTCGGTCGCGAGAGCGG | 2552 |
| | | GCTCTG | |
| 7702-L2-1 | 10q21.2 | GGGGCGGGGAGGAATTCCGGTTCTCTGGGACTTTCCAAAAAAGGCGAAGATCCGGTGCCGGCGGCTCCGCCTCCCTAGCCCT | 2553 |
| 7824-R5-1 | 6q16.2 | CCTGGATGCTGTTTCATTATGTAGAGTCAGGCAAAAGACAGACGGATGTGTGTGTGAGGCGGCGATGAAGCTGGCACCAGG | 2554 |
| 7949-R5-1 | 5q31.3 | GGTGCGCGCGGTGGACGCCGATTCGGGCTACAATGCGTGGCTTTCGTATGAATTGCAGCTGGCGGCGGTCGGCGCGCGCATC | 2555 |
| 8016-L3-1 | 12q21.1 | AGAGGGGTGACTGCGGGGCTTGTTGCGCTGAAGATTTACAATGTACTTCTTGCAGGCGGCTCAGCAACCCCCTCT | 2556 |
| 8250-R5-2 | 9p11.2 | CGGAGCCGCCCGCGCCAGCCTCTCCATCTCGCAAGTTTTAATTAACGCTGAGGGAGAGGCGGCTGACGGGCGGGTCGG | 2557 |
| 8394-L5-1 | 7p13 | GGGGCCAGGGATAGTCGGAGATGGGCAGGGCGGGGGCCCCACTGGCGAGGGGCCCTCGGCTTCTGGGGTCCCTGAGCCCC | 2558 |
| 8898-R5-1 | 17p13.3 | GGCGCTGTCGGCCGGGGCGGCCGCCGGCAACTCGTCCGTCTTGATAACCATGGTGGCGGGAGCGGGCGTCCGCCTCGGCTGTCC | 2559 |
| | | GCGCC | |
| 9053-R3-1 | Xq27.3 | GGAAGGGCACTGTCTCTCTGATTCCCAGGGCCTGTCATTTCCCGAGGGCTGGTGGAGCCCGGGATTGGAGGGCAAGAAGCCCAG | 2560 |
| | | CC | |
| 9387-R2-2 | 3p21.1 | TCTCCATCCTCTGTCTCCCTTGATCCTCTGTTCTCCCTGATGGCTTTGAGATGAAGGCGACGGCAAGGATGGAGG | 2561 |
| 9691-L5-1 | 14q24.3 | GCAAGGGGCCAAGAGGGAGATGCGGATGAAATGGATGATTTAATGGGTCATCTCTCCTGTAGTTAATTTCTCTAGATCTCTTGT | 2562 |
| 9774-R2-2 | 13q13.3 | GCTTGTCCTAAAAGATCTTCCTTCTGTTTCCCTGGGTTTATCCACTTGGTTGGCCTGATGGGAGCAGGAGGCGGTGAGGGGGCGGGC | 2563 |
| miR-1228* | 12q13.3 | GTGGGCGGGGGCAGGTGTGTGGTGGGTGGTGGCCTGCGGTGAGCAGGGCCCTCACACCTGCCTCGCCCCCCAG | 2564 |
| miR-1275 | 6p21.31 | CCTCTGTGAGAAAGGGTGTGGGGGAGAGGCTGTCTTGTGTCTGTAAGTATGCCAAACTTATTTTCCCCAAGGCAGAGGGA | 2565 |
| miR-1308 | Xp22.11 | CCCCGCATGGGTGGTTCAGTGGCAGAATTCTCAAATTGTAATCCCCATAATCCC | 2566 |
| miR-21 | 17q23.1 | TGTCGGGTAGCTTATCAGACTGATGTTGACTGTTGAATCTCATGGCAACACCAGTCGATGGGCTGTCTGACA | 2567 |
| miR-373* | 19q13.41 | GGGATACTCAAAATGGGGGCGCTTTCCTTTTTGTCTGTACTGGGAAGTGCTTCGATTTTGGGGTGTCCC | 2568 |
| miR-423-5p | 17q11.2 | ATAAAGGAAGTTAGGCTGAGGGGCAGAGAGCGAGACTTTTCTATTTTCCAAAAGCTCGGTCTGAGGCCCCTCAGTCTTGCTTCCTAAC | 2569 |
| | | CCGCGC | |
| miR-486-3p | 8p11.21 | GCATCCTGTACTGAGCTGCCCCGAGGCCCTTCATGCTGCCCAGCTCGGGGCAGCTCAGTACAGGATAC | 2570 |
| miR-612 | 11q13.1 | TCCCATCTGGACCCTGCTGGGCAGGGCTTCTGAGCTCCTTAGCACTAGCAGGAGGGGCTCCAGGGGCCCTCCCTCCATGGCAGCCA | 2571 |
| | | GGACAGGACTCTCA | |
| miR-638 | 19p13.2 | GTGAGCGGGCGCGGCAGGGATCGCGGGCGGGTGGCGGCCTAGGGCGCGGAGGGCGGACCGGGAATGGCGCGCCGTGCGCCGC | 2572 |
| | | CGGCGTAACTGCGGCGCT | |
| miR-663 | 20p11.1 | CCTTCCGGCGTCCCAGGCGGGGCGCCGCGGGACCGCCCTCGTGTCTGTGGCGGTGGGATCCCGCGGCCGTGTTTTCCTGGTGGC | 2573 |
| | | CCGGCCATG | |
| miR-744 | 17p12 | TTGGGCAAGGTGCGGGGCTAGGGCTAACAGCAGTCTTACTGAAGGTTTCCTGGAAACCACGCACATGCTGTTGCCACTAACCTCAAC | 2574 |
| | | CTTACTCGGTC | |
| miR-923 | 17q12 | TATTTGTCAGCGGAGGAAAAGAAACTAACCAGGATTCCCTCAGTAATGGCGAGTG | 2575 |

### 5.6 Example 6

### Target RNA Levels in Primary Tumors and Cell Lines

[0345] Data from Examples 4 and 5 were analyzed to identify target RNAs that were found to be up-expressed in both primary lung tumors and in lung cancer cell lines. Table 32 shows a list of the target RNAs from Table 27 (i.e., target RNAs that are present at increased levels in at least four lung cancer cell lines) that are also in Tables 18 to 21 (i.e., target RNAs that are present at increased levels in more than 50% of primary lung tumors tested, and target RNAs that are present at least 5-fold increased levels in fewer than 50% of primary lung tumors tested). Table 33 shows a list of the target RNAs from Table 28 (i.e., target RNAs that are present at least 5-fold increased levels in two or three cell lines) that are also in Tables 18 to 21.

TABLE 32
Target RNAs from Table 27 that are also in Tables 18 to 21

| target RNA from | | | | | Present in Tables 20 |
|---|---|---|---|---|---|
| Table 27 (increased | probe | pre- | | Present in Tables 18 | and 21 (increased at |
| in at least four cell | SEQ ID | microRNA | microRNA | and 19 (increased in at | least 5-fold in <50% |
| lines) | NO | SEQ ID NO | SEQ ID NO | least 50% tumors)? | tumors)? |
| 10083-L5-1 | 1090 | 1211 | | | Yes |
| 13122-L5-1 | 1066 | 1242 | 2587 | Yes | |
| 13185-L5-3 | 1118 | 1243 | 2603 | Yes | |
| 13219-L5-1 | 1067 | 1245 | | Yes | |
| 3744-R5-1 | 1143 | 1271 | 2645, 2646 | | Yes |
| 6235-R5-2 | 1075 | 1296 | 2661 | Yes | |
| 6474-L5-1 | 1164 | 1299 | | | Yes |
| 6681-R2-1 | 1166 | 1301 | | | Yes |
| 8004-R3-2 | 97 | 492 | | Yes | |
| 836-R4-1 | 3 | 400 | | Yes | |
| 9594-R5-1 | 1081 | 1328 | | Yes | |
| miR-103 | 361 | 754, 755 | 803 | | Yes |
| miR-200b | 193 | 692 | 839 | Yes | |
| miR-200c | 194 | 693 | 840 | Yes | |
| miR-20b | 380 | 776 | 843 | Yes | |
| miR-298 | 1088 | 1351 | 858 | Yes | |

TABLE 33
Target RNAs from Table 28 that are also in Tables 18 to 21

| target RNA from | | | | | Present in Tables 20 |
|---|---|---|---|---|---|
| Table 28 (increased | probe | pre- | | Present in Tables 18 | and 21 (increased at |
| 5-fold in 2 or 3 cell | SEQ ID | microRNA | microRNA | and 19 (increased in at | least 5-fold in <50% |
| lines) | NO | SEQ ID NO | SEQ ID NO | least 50% tumors)? | tumors)? |
| 10335-L5-2 | 1092 | 1213 | | | Yes |
| 12729-R5-1 | 1103 | 1186 | | | Yes |
| 12888-L5-2 | 1105 | 1188 | | | Yes |
| 12917-R5-2 | 1108 | 1230 | | | Yes |
| 12992-L5-1 | 1112 | 1235 | | | Yes |
| 13001-L5-1 | 1113 | 1236 | | | Yes |
| 13070-R5-3 | 1115 | 1238 | | | Yes |
| 13274-L5-3 | 1124 | 1251 | 2612 | | Yes |
| 13357-L5-4 | 1128 | 1255 | 2621 | | Yes |
| 13366-R5-3 | 1129 | 1256 | 2623 | | Yes |
| 13467-L5-1 | 1069 | 1262 | 2630 | Yes | |
| 13470-R5-1 | 1136 | 1264 | | | Yes |
| 3875-R5-2 | 1144 | 1272 | | | Yes |
| 3923-R5-1 | 1070 | 1273 | 2647 | Yes | |
| 5108-R5-2 | 1153 | 1286 | | | Yes |
| 5723-R5-1 | 1156 | 1289 | | | Yes |
| 6752-R5-2 | 1168 | 1303 | | | Yes |
| 6803-R5-2 | 1169 | 1304 | | | Yes |
| 6930-R5-1 | 1173 | 1308 | 2667 | | Yes |
| 8433_C-R4-1 | 1177 | 1317 | | | Yes |
| 8433-L3-1 | 1179 | 1318, 1319 | | | Yes |
| 8724-R5-2 | 1181 | 1320 | | | Yes |
| 8808-R5-1 | 1183 | 1322 | | | Yes |
| 8832-R5-1 | 1184 | 1323 | | | Yes |
| 9349-R5-2 | 1080 | 1325 | 2672 | Yes | |
| miR-198 | 1202 | 1343 | 834 | | Yes |
| miR-720 | 1089 | 1362 | 917 | Yes | |

[0346] Finally, Table 34 shows target RNAs that are present at decreased levels in both primary tumors and cell lines relative to normal tissue or cell lines.

TABLE 34
Target RNAs present at decreased levels
in primary tumors and cell lines

| | | pre- | |
|---|---|---|---|
| | probe SEQ | microRNA | microRNA |
| Gene | ID NO | SEQ ID NO | SEQ ID NO |
| 10010_B-L4-1 | 157 | 551 | |
| 10010_D-L4-1 | 158 | 552 | |
| 10231-R3-1 | 1368 | 1713 | |
| 10342-R2-2 | 1371 | 1716 | |
| 11370-L5-5 | 1379 | 1724 | |
| 12691-R5-1 | 1385 | 1730 | |
| 12692-L5-1 | 1386 | 1731 | |
| 12693-L5-1 | 1387 | 1732 | |
| 12694-R5-1 | 1388 | 1733 | |
| 12696-R5-2 | 1389 | 1734 | |
| 12697-R5-1 | 1390 | 1735 | |
| 12699-L5-1 | 1391 | 1736 | 2585 |
| 12701-L5-1 | 1392 | 1737 | |
| 12703-L5-3 | 1393 | 1738 | |
| 12704-L5-2 | 1394 | 1739 | |
| 12713-R5-1 | 1395 | 1740 | |
| 12722-L5-1 | 1396 | 1741 | |
| 13004-R5-1 | 1411 | 1756 | |
| 13047-R5-2 | 1412 | 1757 | |
| 13052-L5-1 | 1414 | 1759 | |
| 13093-L5-2 | 1419 | 1765 | |
| 13097-L5-2 | 1422 | 1767 | |
| 13119-R5-2 | 1425 | 1771 | |
| 13129-L5-3 | 1427 | 1773, 1774 | |
| 13130-L5-2 | 2352 | 2486 | |
| 13137-L5-1 | 1431 | 1779 | |
| 13138-R5-1 | 1432 | 1780 | |
| 13209-R5-3 | 1444 | 1792 | |
| 13211-L5-1 | 1445 | 1793 | |
| 13229-L5-1 | 1447 | 1795 | |
| 13239-L5-2 | 1451 | 1800 | |
| 13240-L5-2 | 1452 | 1801 | |
| 13267-L5-1 | 1456 | 1805 | |
| 13281-L5-3 | 1457 | 1806 | |
| 13283-L5-3 | 1458 | 1807 | |
| 13285-L5-3 | 1459 | 1808 | |
| 13291-L5-1 | 1461 | 1810 | |
| 13312-L5-2 | 1467 | 1816 | |
| 13326-L5-2 | 1470 | 1820 | |
| 13343-L5-1 | 1477 | 1828 | 2619 |
| 13349-L5-2 | 1478 | 1829 | |
| 13365-L5-3 | 1487 | 1838 | |
| 13374-R5-1 | 1490 | 1842, 1843 | |
| 13375-L5-3 | 1491 | 1844 | 2625 |
| 13396-L5-2 | 1495 | 1848 | |
| 13431-L5-3 | 1501 | 1854 | |
| 13432-R5-4 | 2387 | 2516 | |
| 13456-R5-2 | 1503 | 1856 | |
| 13461-L5-4 | 1505 | 1858 | |
| 13497-L5-1 | 1508 | 1861 | |
| 266-R5-2 | 1513 | 1866 | |
| 2819-R5-4 | 1516 | 1869 | |
| 3799-R5-1 | 1519 | 1872 | |
| 3897-R5-2 | 1520 | 1873 | |
| 3953-R3-2 | 1523 | 1876 | |
| 3966-L5-1 | 1524 | 1877 | |
| 4315_C-L4-1 | 1533 | 1886 | |
| 4315_D-R4-1 | 1534 | 1887 | |
| 4315_E-R4-1 | 1535 | 1888 | |
| 4315_F-R4-1 | 1536 | 1889 | |
| 4315_I-L4-1 | 1537 | 1890 | |
| 4315_K-L4-1 | 1538 | 1891 | |
| 4593-R5-1 | 1547 | 1900 | |
| 5071-R5-2 | 1560 | 1913 | |
| 5640-L3-1 | 1569 | 1922 | |
| 6198-R5-2 | 1582 | 1935 | |
| 6880-L3-2 | 1596 | 1949 | |
| 7126-L3-1 | 1604 | 1857 | |
| 7356_A-R4-1 | 1609 | 1962 | |
| 7702-L2-1 | 1618 | 1971 | |
| 782-R5-1 | 1622 | 1975 | |
| 7949-R5-1 | 1626 | 1979 | |
| 8016-L3-1 | 1628 | 1981 | |
| 8250-R5-2 | 1633 | 1986 | |
| 8394-L5-2 | 1638 | 1991 | |
| 8898-R5-1 | 1641 | 1994 | |
| 9387-R2-2 | 1651 | 2004 | |
| 9691-L5-1 | 1654 | 2007 | |
| 9774-R2-2 | 1656 | 2009 | |
| miR-373* | 1693 | 2049 | |
| miR-486-3p | 1695 | 2051 | |
| miR-638 | 1699 | 2055 | |
| miR-663 | 1700 | 2056 | |
| miR-744 | 1702 | 2058 | |

### 5.7 Example 7

### Additional Target RNAs from Primary Tumors

[0347] In addition to the target RNAs identified in Example 4, certain additional target RNAs were identified in that experiment as being present at elevated levels in squamous cell carcinoma (SCC). Further, one additional target RNA (miR-320c) was identified as being elevated in at least three of the most aggressive tumors in Example 4. Those additional target RNAs, and miR-320c, are shown in Tables 35 and 36, along with the fold-change in each of the primary tumors. Data for six of the tumors are shown in Table 35 and data for the remaining 13 tumors are shown in Table 36. Table 35 also shows the probe sequences used to detect the target RNAs. Table 37 shows the pre-microRNA sequences and chromosomal location of the pre-microRNA gene for each of the target RNAs in Tables 36 and 37.

TABLE 35

Additional target RNAs more frequently present at elevated levels
in squamous cell carcinoma (SCC), and miR-320c

| | | | | | | | | |
|---|---|---|---|---|---|---|---|---|
| | | SEQ ID | | | | | | |
| Gene | Probes sequences | NO | ADK9 | ADK10 | Adk29 | Adk15 | Adk23 | ADK48 |

| | | | | | | | | |
|---|---|---|---|---|---|---|---|---|
| 13108-L5-2 | CTGCTGCCTTCCTTGGTTGAGGGGCCTGAGCACG | 2673 | −5.44 | −5.44 | 1.00 | −1.07 | −2.30 | −1.55 |
| 13272-R5-2 | TCACCGTGCCTCCCTTTGGAAGAGGTAGAAGTCA | 2674 | −2.63 | −2.63 | −2.63 | −2.63 | −1.60 | 5.15 |
| 13316-R5-2 | CCACCACCTTGCTGCTGGCCCACAGCACCAGGCC | 2675 | −4.30 | −4.30 | −2.50 | −2.88 | −4.30 | −1.25 |
| 13331-L5-2 | CCCGAACCCACTCTGAGCACTCGGCACCAGCA | 2676 | 1.69 | −3.04 | −1.84 | 1.35 | −1.38 | −3.04 |
| 13499-R5-1 | ACAAGTTTCTCAGGAAGTCTGAACACTGGGTTT | 2677 | 2.23 | −2.83 | 1.29 | 1.39 | −1.37 | 1.07 |
| 5971-R5-2 | TGCCTGCTCAGCCTCCCACATCTGTTCCTGG | 2678 | 1.36 | −2.71 | −5.23 | −1.20 | −2.32 | 2.33 |
| 7026-L3-1 | GAAAACCTCACCCACCAGATCCGGGAACGA | 2679 | −4.57 | −4.57 | −4.57 | −3.02 | −2.20 | −4.57 |
| 7471-L5-1 | AAATGCAAATGCCCCCTAAGGAGAAGAACTTC | 2680 | −6.11 | −6.11 | −6.11 | −1.41 | −3.03 | 3.29 |
| miR-320c | ACCCTCTCAACCCAGCTTTT | 2689 | −6.09 | −6.09 | −3.75 | −1.52 | 1.03 | −6.09 |

TABLE 36
Additional target RNAs more frequently present at elevated levels
in squamous cell carcinoma (SCC), and miR-320c (con't)

| Gene | Adk40 | Adk41 | Adk49 | Epi42 | Epi43 | Ksarc19 | Kmalp21 | Kmalp25 | EPI-4 | Kmalp44 | Scc27 | Lcnec31 | Car13 |
|---|---|---|---|---|---|---|---|---|---|---|---|---|---|
| 13108-L5-2 | −5.44 | −5.44 | 3.75 | 2.76 | 2.52 | 2.92 | 1.32 | 1.28 | 6.13 | 2.43 | 1.71 | 2.26 | −5.44 |
| 13272-R5-2 | −2.63 | −2.63 | −1.32 | −2.63 | 3.89 | 2.75 | 2.27 | 1.53 | 10.30 | 3.13 | 2.20 | 2.16 | −2.63 |
| 13316-R5-2 | −4.30 | −4.30 | −2.20 | 2.94 | 2.28 | 1.96 | 3.07 | −1.31 | 4.09 | 1.82 | 2.30 | 1.24 | −4.30 |
| 13331-L5-2 | −3.04 | −3.04 | 4.06 | −3.04 | 4.60 | 2.19 | 1.84 | 2.46 | 8.67 | 4.20 | 1.80 | 2.26 | −3.04 |
| 13499-R5-1 | −2.83 | −2.83 | 5.02 | 4.08 | 4.17 | 1.08 | 2.12 | 1.95 | −2.83 | 3.61 | 1.34 | 1.21 | −2.83 |
| 5971-R5-2 | −5.23 | −5.23 | −2.44 | 2.15 | 2.01 | 2.54 | 1.93 | 1.48 | 4.62 | −5.23 | 1.20 | 1.38 | −5.23 |
| 7026-L3-1 | −4.57 | 1.04 | 2.37 | −1.93 | 2.63 | 2.98 | 2.00 | −1.19 | 4.29 | 2.31 | 1.36 | 1.10 | −4.57 |
| 7471-L5-1 | −6.11 | −6.11 | −1.05 | 6.18 | 3.37 | 2.29 | 3.21 | −1.10 | 8.46 | −6.11 | −1.14 | −1.42 | −6.11 |
| miR-320c | −6.09 | −6.09 | 1.74 | −2.76 | 2.05 | 11.65 | 2.58 | 1.15 | 5.22 | 1.76 | 2.06 | −1.01 | −6.09 |

TABLE 37
Chromosomal locations and pre-microRNA sequences for target RNAs in Tables 36 and 37

| | Chromosomal | | |
|---|---|---|---|
| Gene | Location | precursor sequence | SEQ ID NO |
| 13108-L5-2 | 2p23.1 | TTCCCACACGTGCTCAGGCCCCTCAACCAAGGAAGGCAGCAGGCCCACTGGCCTCCTTATTCA | 2681 |
| | | GAGGGGCTGCACTGCACCCTAGGGAG | |
| 13272-R5-2 | 12q13.11 | GTCACACAGTTATGTTAGGCCATCACAGCATTGGAATAGGGGATATCTCAGCATGTTGAGCCC | 2682 |
| | | TGTCTCTGGGGAGCTGACTTCTACCTCTTCCAAAGGGAGGCACGGTGATTGGAAGTGC | |
| 13316-R5-2 | 16p12.3, 16p13.11 | GCTCAATGCCTCCAACGCAGTCAGCTGGGTCTCAGCCACGTACAACCTCACGGTGGAGGAGC | 2683 |
| | | CCATCGTGGGCCTGGTGCTGTGGGCCAGCAGCAAGGTGGTGGCGCCCGGGCA | |
| 13331-L5-2 | 17q21.2 | TGCGGAGTGCTGGTGCCGAGTGCTCAGAGTGGGTTCGGGTTCAGTCCCTGAACCCAAGCATC | 2684 |
| | | CTCTGCACCCAGATCCTGC | |
| 13499-R5-1 | 7q32.2 | AACAGTCCAGGGAAATGACAGTTGAGTTGCACAAACCCAGTGTTCAGACTTCCTGAGAAACTT | 2685 |
| | | GT | |
| 5971-R5-2 | 1q24.1 | TGCCATCTGCTCTGAAGCCTCCCAAGCTGGGCCTCCCCTCCCACTTCTGGAGCCCAGGAACAG | 2686 |
| | | ATGTGGGAGGCTGAGCAGGCA | |
| 7026-L3-1 | 15q15.3 | TCGTTCCCGGATCTGGTGGGTGAGGTTTTCGATCAGGGCAAATACCTGATCACAGACCTTCAC | 2687 |
| | | AGGATTCTGGATGA | |
| 7471-L5-1 | 1q21.1 | GAAGTTCTTCTCCTTAGGGGGCATTTGCATTTTAATGGGAATCTTAAAAACCCAAAGGAAATG | 2688 |
| | | TTCTCTAATGGTGGGATTTC | |
| miR-320c | 18q11.2 | TTTGCATTAAAAATGAGGCCTTCTCTTCCCAGTTCTTCCCAGAGTCAGGAAAAGCTGGGTTGA | 2690 |
| | | GAGGGTAGAAAAAAAATGATGTAGGCTTCTCTTTCCAGTTCTTCCCAGAATTGGGAAAAGCTG | |
| | | GGTTGAGAGGGT | |
| miR-320c | 18q11.2 | CTTCTCTTTCCAGTTCTTCCCAGAATTGGGAAAAGCTGGGTTGAGAGGGT | 2691 |

### 5.8 Example 8

### Bioinformatic Analysis to Identify microRNAs

[0348] In order to identify the microRNAs detected with the probes shown, e.g., in Tables 1, 2, 6 to 9, 18 to 21, 23, 27, 28, 30, and 32 to 34, small RNA sequencing (smRNASeq) datasets were analysed using the probe sequences to identify expressed microRNAs detected by those sequences. The analysis identified 97 sequences with precise ends. Those 97 candidate microRNA sequences are show in Table 38.

TABLE 38
microRNA candidate sequences
corresponding to probes

| Name | Candidate sequences 5′->3′ | SEQ ID NO |
|---|---|---|
| 10233-R | TCTACTGCCTGCTGCTC | 2576 |
| 10333-L | GGAGGGGGTGGGCAGGG | 2577 |
| 10455-L | AGAGGGATGTTTGGCGC | 2578 |
| 10520-L | CAGAGAAGGCTGGAGGAGG | 2579 |
| 10844-R | AACACATGTTTGAAAGT | 2580 |
| 11358-R | CATGTCAGCCTAGTTTCCC | 2581 |
| 11605-L | AAAGAAGGGAAGAGAAGA | 2582 |
| 11688-R | GTCGGCGTCTCCATCCTG | 2583 |
| 12223-L | AGAGGGAGAAGAAACAA | 2584 |
| 12699-R | CCACCACCGCCACCACCC | 2585 |
| 12707-L | AGTTGTTGGATTGCAGA | 2586 |
| 12723-R | CAGGAAGGGGCTGGGGG | 2587 |
| 12730-R | CCCGGAGAGCGGAGCACAACACA | 2588 |
| 12730-R | CCGGAGAGCGGAGCACAAC | 2589 |
| 12911-L | GAGGAAAAGGAAGGAGG | 2590 |
| 12912-L | CTGTGGGTGGAAGGTGCCAGAA | 2591 |
| 12974-R | AAGTTAAATAACTCTGAACCA | 2592 |
| 13071-L | ATGTGCCGAGATGTGAGCAGTC | 2593 |
| 13071-L | ATGTGCCGAGATGTGAGCAGTCAC | 2594 |
| 13108-L | CCAAGGAAGGCAGCAGGC | 2595 |
| 13115-L | TTGGGGTGGTCGGCCCTGGAGG | 2596 |
| 13122-L | GATGGAATTTCCTAAAGG | 2597 |
| 13124-L | GGAGGGGAGGAGACATG | 2598 |
| 13124-L | GGAGGGGAGGAGACATG | 2599 |
| 13163-R | GGGAGGGAGAGAAGGAG | 2600 |
| 13163-R | GGGAGGGAGAGAAGGAGG | 2601 |
| 13163-R | GGGAGGGAGAGAAGGAGGGG | 2602 |
| 13185-L | AGAGGGAAGAAAAAAAA | 2603 |
| 13225-L | AGTGGGCAGGAAGAACCAGGCT | 2604 |
| 13235-R | AGAGCTGAGACTAGAAAGCCCA | 2605 |
| 13237-L | TTGGGGTGGTCGGCCCTGGAGG | 2606 |
| 13245-L | GGGAGTAGAAGGGAAAGACTAT | 2607 |
| 13247-L | GAGGTCGGGAGGGGAAGGCGGCT | 2608 |
| 13252-L | TCAAGGAGCTCACAGTC | 2609 |
| 13254-R | GCATGAGTGGTTCAGTGGT | 2610 |
| 13272-R | TGACTTCTACCTCTTCCAAAG | 2611 |
| 13274-L | TGAGGGAGGGTGGGAGC | 2612 |
| 13278-R | GTGGAGTCCTGGGGAATGGAGA | 2613 |
| 13287-L | AGGGTGGGGTGGCTCCTCTGCAG | 2614 |
| 13309-L | TCCCTGTCCTCCACAAGCT | 2615 |
| 13316-R | CAGCAGCAAGGTGGTGG | 2616 |
| 13331-L | TGGTGCCGAGTGCTCAGAGTG | 2617 |
| 13334-L | AGTGGGAGGGGAGGGGAGTCCTGCCA | 2618 |
| 13343-L | TGAGGGGCCGGGAGCCA | 2619 |
| 13352-R | TAGCCCCATTTCACAGAT | 2620 |
| 13357-L | GCTGCAGGGAGGTGTGGGGA | 2621 |
| 13358-L | AGTGTGGAGGGGGTGGTGA | 2622 |
| 13366-R | TGGGAATAGGAGAGGGCACTG | 2623 |
| 13373-R | TGCCCCACCTGCTGACCACCCTC | 2624 |
| 13375-R | AACCTTGGCCCCTCTCCCCAG | 2625 |
| 13395-R | GTGGAGTCCTGGGGAATGGAGA | 2626 |
| 13398-R | CAAAGTGAGTCTAGTCTGCA | 2627 |
| 13403-L | TTGGGGGGACACGGGTGG | 2628 |
| 13436-L | AGCTGTGGTCACCGGAGCTCAGAGGC | 2629 |
| 13467-L | GAGGGTCTGACTGTCACTTGGA | 2630 |
| 13468-L | GAGGGTCTGATGGCCACTTGGA | 2631 |
| 13472-L | CAGGAGGACGTCACACACAGTG | 2632 |
| 13473-L | TAGGTGGTAGAAGGGCAAACA | 2633 |
| 13499-R | CCCAGTGTTCAGACTTCCTG | 2634 |
| 13500-L | TGGAGAGAGAGGCCTGGAAGA | 2635 |
| 13500-L | TGGAGAGAGAGGCCTGGAAGAT | 2636 |
| 13508-L | TGTGAGGAAGCTAAGAGCAG | 2637 |
| 13522-L | AGTGCAGTGGTGTGATC | 2638 |
| 13523-R | GCAGGGGAAGAAGCCTT | 2639 |
| 13530-L | GGGGGACCCAGGGGAAGGAGG | 2640 |
| 13545-L | ACAGCCTCCCTTGCGCCACAG | 2641 |
| 25-R | TTAGAAAAAGAGGGGGTGAGG | 2642 |
| 3249-L | GCGGCGGCGGCGGCGGC | 2643 |
| 3371-L | TGGGGTGTGGAGGGGAGG | 2644 |
| 3744-R | AGGGGAGCAGGGAGGAA | 2645 |
| 3744-R | GCAGGGAGGAAGGAGAA | 2646 |
| 3923-R | TGGAGAGGGATGAAGGAGAT | 2647 |
| 4440-L | TCTGCCCAGTGCTCTGAATGTCA | 2648 |
| 4440-L | CCAGTGCTCTGAATGTCAAA | 2649 |
| 5080-R | TGGAGAGGGATGAAGGAGA | 2650 |
| 5192-L | GAGGAAGGAAGGGGAAA | 2651 |
| 5192-L | AGGAAGGAAGGGGAAAAA | 2652 |
| 5232-L | CCTTGATGTCCTGCAAATGA | 2653 |
| 5392-R | ATGAGATACTGTCGGAGA | 2654 |
| 5723-R | CTGCTGGAGAAAGGGGAGGAGG | 2655 |
| 5842-R | TTCATTTCTCTTTCATAA | 2656 |
| 5971-R | ACTTCTGGAGCCCAGGAACA | 2657 |
| 6037-R | TAGTTGGAGGAAAATTGGAG | 2658 |
| 6216-L | TGCCCAGTGCTCTGAATGTC | 2659 |
| 6216-R | ACGGCGGGAGTAACTATG | 2660 |
| 6235-R | AAATGGATTTTTGGAGCAG | 2661 |
| 6496-R | AGGGGAAGTGGTGGGTG | 2662 |
| 6496-R | GTGGGTGGGGGAGGGGG | 2663 |
| 6681-R | GGAGGGGCAGAGAGAGAG | 2664 |
| 6864-R | AGGTGGGCACTCTAAGG | 2665 |
| 6906-L | TGGTTGGGGAGAAGACA | 2666 |
| 6930-R | TGCAAGATCAGAGGGGAGA | 2667 |
| 7726-R | TCCTCTTCTCCTCTTCT | 2668 |
| 8433-L | CGGTGGAGGGAAAGGGGAAA | 2669 |
| 8452-L | AACACCCCAGCCATGTA | 2670 |
| 8832-R | CAAAGTGGGGGAAAAACAGGTG | 2671 |
| 9349-R | TCCGAGACCTGGAGCAG | 2672 |

[0349] All publications, patents, patent applications and other documents cited in this application are hereby incorporated by reference in their entireties for all purposes to the same extent as if each individual publication, patent, patent application or other document were individually indicated to be incorporated by reference for all purposes.

[0350] While various specific embodiments have been illustrated and described, it will be appreciated that changes can be made without departing from the spirit and scope of the invention(s).

1. A method for detecting the presence of lung cancer in a subject, the method comprising detecting a level of at least one target RNA in a sample from the subject, wherein the at least one target RNA:
(i) is capable of specifically hybridizing to a nucleic acid having a sequence selected from SEQ ID NOs: 1 to 397, 1063 to 1210, 2064 to 2183, 2673 to 2680, and 2689; or
(ii) comprises a sequence that is complementary to at least 15 contiguous nucleotides of a sequence selected from SEQ ID NOs: 1 to 397, 1063 to 1210, 2064 to 2183, 2673 to 2680, and 2689; or
(iii) comprises at least 15 contiguous nucleotides of a sequence selected from SEQ ID NOs: 794 to 1043, 2576 to 2672, and 2692;
wherein a level of at least one target RNA in the sample that is greater than a normal level of the at least one target RNA indicates the presence of lung cancer in the subject.

2. The method of claim 1, wherein the method further comprises comparing the level of the at least one target RNA in the sample to a normal level of the at least one target RNA.

3. A method for facilitating the detection of lung cancer in a subject, comprising:
(a) detecting a level of at least one target RNA in a sample from the subject, wherein the at least one target RNA:
(i) is capable of specifically hybridizing to a nucleic acid having a sequence selected from SEQ ID NOs: 1 to 397, 1063 to 1210, 2064 to 2183, 2673 to 2680, and 2689; or
(ii) comprises a sequence that is complementary to at least 15 contiguous nucleotides of a sequence selected from SEQ ID NOs: 1 to 397, 1063 to 1210, 2064 to 2183, 2673 to 2680, and 2689; or
(iii) comprises at least 15 contiguous nucleotides of a sequence selected from SEQ ID NOs: 794 to 1043, 2576 to 2672, and 2692; and
(b) communicating the results of the detection to a medical practitioner for the purpose of determining whether the subject has lung cancer.

4. The method of claim 1, wherein detecting a level of at least one target RNA in a sample comprises:
(a) hybridizing nucleic acids of the sample with at least one polynucleotide that is complementary to a target RNA in the sample or to a complement thereof; and
(b) detecting at least one complex comprising a polynucleotide hybridized to at least one nucleic acid selected from the target RNA, a DNA amplicon of the target RNA, and a complement of the target RNA.

5. A method for detecting the presence of lung cancer in a subject, comprising:
(a) obtaining a sample from the subject,
(b) providing the sample to a laboratory for detection of the level of at least one target RNA in the sample, wherein the at least one target RNA:
(i) is capable of specifically hybridizing to a nucleic acid having a sequence selected from SEQ ID NOs: 1 to 397, 1063 to 1210, 2064 to 2183, 2673 to 2680, and 2689; or
(ii) comprises a sequence that is complementary to at least 15 contiguous nucleotides of a sequence selected from SEQ ID NOs: 1 to 397, 1063 to 1210, 2064 to 2183, 2673 to 2680, and 2689; or
(iii) comprises at least 15 contiguous nucleotides of a sequence selected from SEQ ID NOs: 794 to 1043, 2576 to 2672, and 2692; and
(c) receiving from the laboratory a communication indicating the level of at least one target RNA in the sample;
wherein a level of at least one target RNA that is greater than a normal level of the at least one target RNA indicates the presence of lung cancer.

6. The method of claim 1, wherein the method further comprises isolating nucleic acids from the sample.

7. The method of claim 6, wherein the nucleic acids comprise RNA that has been separated from DNA.

8. The method of claim 1, wherein at least one target RNA in its mature form comprises fewer than 30 nucleotides.

9. The method of claim 1, wherein at least one target RNA is a microRNA.

10. The method of claim 1, wherein levels of at least two target RNAs are detected, wherein at least two of the target RNAs:
(i) are capable of specifically hybridizing to a nucleic acid having a sequence selected from SEQ ID NOs: 1 to 397, 1063 to 1210, 2064 to 2183, 2673 to 2680, and 2689; or
(ii) comprise a sequence that is complementary to at least 15 contiguous nucleotides of a sequence selected from SEQ ID NOs: 1 to 397, 1063 to 1210, 2064 to 2183, 2673 to 2680, and 2689; or
(iii) comprise at least 15 contiguous nucleotides of a sequence selected from SEQ ID NOs: 794 to 1043, 2576 to 2672, and 2692; and
wherein the at least two target RNAs are different.

11. The method of claim 10, wherein detection of a level of at least one target RNA that is greater than a normal level of the at least one target RNA indicates the presence of lung cancer.

12. The method of claim 10, wherein detection of levels of at least two target RNAs that are greater than normal levels of the at least two target RNAs indicates the presence of lung cancer.

13. The method of claim 10, wherein levels of at least three target RNAs are detected, wherein at least three of the target RNAs:
(i) are capable of specifically hybridizing to a nucleic acid having a sequence selected from SEQ ID NOs: 1 to 397, 1063 to 1210, 2064 to 2183, 2673 to 2680, and 2689; or
(ii) comprise a sequence that is complementary to at least 15 contiguous nucleotides of a sequence selected from SEQ ID NOs: 1 to 397, 1063 to 1210, 2064 to 2183, 2673 to 2680, and 2689; or
(iii) comprise at least 15 contiguous nucleotides of a sequence selected from SEQ ID NOs: 794 to 1043, 2576 to 2672, and 2692; and
wherein the at least three target RNAs are different.

14. The method of claim 13, wherein detection of a level of at least one target RNA that is greater than a normal level of the at least one target RNA indicates the presence of lung cancer.

15. The method of claim 13, wherein detection of levels of at least two target RNAs that are greater than normal levels of the at least two target RNAs indicates the presence of lung cancer.

16. The method of claim 13, wherein detection of levels of at least three target RNAs that are greater than normal levels of the at least three target RNAs indicates the presence of lung cancer.

17. The method of claim 10, wherein levels of at least five target RNAs are detected.

18. The method of claim 10, wherein a level is detected of at least one target RNA that:
(i) does not specifically hybridize to a nucleic acid having a sequence selected from SEQ ID NOs: 1 to 397, 1063 to 1210, 2064 to 2183, 2673 to 2680, and 2689; or
(ii) does not comprise a sequence that is complementary to at least 15 contiguous nucleotides of a sequence selected from SEQ ID NOs: 1 to 397, 1063 to 1210, 2064 to 2183, 2673 to 2680, and 2689; and
(iii) does not comprise at least 15 contiguous nucleotides of a sequence selected from SEQ ID NOs: 794 to 1043, 2576 to 2672, and 2692.

19. The method of claim 1, wherein at least one target RNA:
(a) is capable of specifically hybridizing to a polynucleotide sequence selected from SEQ ID NOs: 196, 246, 15, 205, 207, 248, 191, 219, 197, 184, 225, 129, 214, 26, 164, 30, and 27; or
(b) comprises a sequence that is complementary to at least 15 contiguous nucleotides of a polynucleotide sequence selected from SEQ ID NOs: 196, 246, 15, 205, 207, 248, 191, 219, 197, 184, 225, 129, 214, 26, 164, 30, and 27.

20. The method of claim 19, wherein detection of a level of the at least one target RNA that is greater than a normal level of the at least one target RNA indicates the presence of non-small cell lung cancer.

21. The method of claim 1, wherein at least one target RNA:
(a) is capable of specifically hybridizing to a polynucleotide sequence selected from SEQ ID NOs: 145, 2110, 1106, 2115, 1108, 1066, 2673 to 2680, 1070, 1148, 25, 1154, 1155, 2149, 80, 97, 1177, 1080, 1081, 1197 195, 243, and 248; or
(b) comprises a sequence that is complementary to at least 15 contiguous nucleotides of a polynucleotide sequence selected from SEQ ID NOs: 145, 2110, 1106, 2115, 1108, 1066, 2673 to 2680, 1070, 1148, 25, 1154, 1155, 2149, 80, 97, 1177, 1080, 1081, 1197, 195, 243, and 248.

22. The method of claim 21, wherein detection of a level of the at least one target RNA that is greater than a normal level of the at least one target RNA indicates the presence of squamous cell carcinoma.

23. The method of claim 1, wherein at least one target RNA:
(a) is capable of specifically hybridizing to a polynucleotide sequence selected from SEQ ID NOs: 1123, 1130, 1188, 363, 1086, 2180, and 251; or
(b) comprises a sequence that is complementary to at least 15 contiguous nucleotides of a polynucleotide sequence selected from SEQ ID NOs: 1123, 1130, 1188, 363, 1086, 2180, and 251.

24. The method of claim 23, wherein detection of a level of the at least one target RNA that is greater than a normal level of the at least one target RNA indicates the presence of adenocarcinoma.

25. The method of claim 1, wherein at least one target RNA:
(a) is capable of specifically hybridizing to a polynucleotide sequence selected from SEQ ID NOs: 1090, 1091, 1063, 1097, 1103, 1105, 1106, 1108, 1064, 1110, 1111, 1113, 1115, 1066, 1118, 1067, 1122, 1124, 1128, 1132, 1069, 1135 to 1137, 138, 1143, 1144, 1146, 1150, 1073, 1153, 1155, 1159 to 1161, 1075, 1164, 1165, 1167, 1172, 1173, 1175, 97, 1177, 1079, 164, 1183, 1080, 1081, 1202, 1088, 1204 2689, 1209, 246; or
(b) comprises a sequence that is complementary to at least 15 contiguous nucleotides of a polynucleotide sequence selected from SEQ ID NOs: 1090, 1091, 1063, 1097, 1103, 1105, 1106, 1108, 1064, 1110, 1111, 1113, 1115, 1066, 1118, 1067, 1122, 1124, 1128, 1132, 1069, 1135 to 1137, 138, 1143, 1144, 1146, 1150, 1073, 1153, 1155, 1159 to 1161 1075, 1164, 1165, 1167, 1172, 1173, 1175, 97, 1177, 1079, 164, 1183, 1080, 1081, 1202, 1088, 1204, 2689, 1209, 246.

26. The method of claim 25, wherein detection of a level of the at least one target RNA that is greater than a normal level of the at least one target RNA indicates the presence of aggressive lung cancer.

27. The method of claim 1, wherein at least one target RNA:
(a) is capable of specifically hybridizing to a polynucleotide sequence selected from SEQ ID NOs: 1090, 1066, 1118, 1067, 1143, 1075, 1164, 1166, 97, 3, 1081, 361, 193, 194, 380, 1088, 1092, 1103, 1105, 1108, 1112, 1113, 1115, 1124, 1128, 1129, 1069, 1136, 1144, 1070, 1153, 1156, 1168, 1169, 1173, 1177, 1179, 1181, 1183, 1184, 1080, 1202, 1089; or
(b) comprises a sequence that is complementary to at least 15 contiguous nucleotides of a polynucleotide sequence selected from SEQ ID NOs: 1090, 1066, 1118, 1067, 1143, 1075, 1164, 1166, 97, 3, 1081, 361, 193, 194, 380, 1088, 1092, 1103, 1105, 1108, 1112, 1113, 1115, 1124, 1128, 1129, 1069, 1136, 1144, 1070, 1153, 1156, 1168, 1169, 1173, 1177, 1179, 1181, 1183, 1184, 1080, 1202, 1089.

28. A method for detecting the presence of lung cancer in a subject, the method comprising detecting a level of at least one target RNA in a sample from the subject, wherein the at least one target RNA:
(i) is capable of specifically hybridizing to a nucleic acid having a sequence selected from SEQ ID NOs: 1 to 397, 1363 to 1707, and 2312 to 2452; or
(ii) comprises a sequence that is complementary to at least 15 contiguous nucleotides of a sequence selected from SEQ ID NOs; 1 to 397, 1363 to 1707, and 2312 to 2452; wherein a level of at least one target RNA in the sample that is reduced relative to a normal level of the at least one target RNA indicates the presence of lung cancer in the subject.

29. The method of claim 28, wherein the method further comprises comparing the level of the at least one target RNA in the sample to a normal level of the at least one target RNA.

30. The method of claim 28, wherein the method further comprises detecting a level of at least one second target RNA in a sample from the subject, wherein the at least one second target RNA:
(i) is capable of specifically hybridizing to a nucleic acid having a sequence selected from SEQ ID NOs: 1 to 397, 1063 to 1210, 2064 to 2183, 2673 to 2680, and 2689; or
(ii) comprises a sequence that is complementary to at least 15 contiguous nucleotides of a sequence selected from SEQ ID NOs: 1 to 397, 1063 to 1210, 2064 to 2183, 2673 to 2680, and 2689; or
(iii) comprises at least 15 contiguous nucleotides of a sequence selected from
SEQ ID NOs: 794 to 1043, 2576 to 2672, and 2692;
wherein a level of at least one second target RNA in the sample that is greater than a normal level of the at least one second target RNA indicates the presence of lung cancer in the subject.

31. A method for facilitating the detection of lung cancer in a subject, comprising:
(a) detecting a level of at least one target RNA in a sample from the subject, wherein the at least one target RNA:
(i) is capable of specifically hybridizing to a nucleic acid having a sequence selected from SEQ ID NOs: 1 to 397, 1363 to 1707, and 2312 to 2452; or
(ii) comprises a sequence that is complementary to at least 15 contiguous nucleotides of a sequence selected from 1 to 397, 1363 to 1707, and 2312 to 2452; and
(b) communicating the results of the detection to a medical practitioner for the purpose of determining whether the subject has lung cancer.

32. The method of claim 31, wherein the method further comprises
(a) detecting a level of at least one second target RNA in a sample from the subject, wherein the at least one second target RNA:
(i) is capable of specifically hybridizing to a nucleic acid having a sequence selected from SEQ ID NOs: 1 to 397, 1063 to 1210, 2064 to 2183, 2673 to 2680, and 2689; or
(ii) comprises a sequence that is complementary to at least 15 contiguous nucleotides of a sequence selected from SEQ ID NOs: 1 to 397, 1063 to 1210, 2064 to 2183, 2673 to 2680, and 2689; or
(iii) comprises at least 15 contiguous nucleotides of a sequence selected from SEQ ID NOs: 794 to 1043, 2576 to 2672, and 2692; and
(b) communicating the results of the detection to a medical practitioner for the purpose of determining whether the subject has lung cancer.

33. The method of claim 28, wherein detecting a level of at least one target RNA in a sample comprises:
(a) hybridizing nucleic acids of the sample with at least one polynucleotide that is complementary to a target RNA in the sample or to a complement thereof; and
(b) detecting at least one complex comprising a polynucleotide hybridized to at least one nucleic acid selected from the target RNA, a DNA amplicon of the target RNA, and a complement of the target RNA.

34. A method for detecting the presence of lung cancer in a subject, comprising:
(a) obtaining a sample from the subject;
(b) providing the sample to a laboratory for detection of the level of at least one target RNA in the sample, wherein the at least one target RNA:
(i) is capable of specifically hybridizing to a nucleic acid having a sequence selected from SEQ ID NOs: 1 to 397, 1363 to 1707, and 2312 to 2452; or
(ii) comprises a sequence that is complementary to at least 15 contiguous nucleotides of a sequence selected from SEQ ID NOs: 1 to 397, 1363 to 1707, and 2312 to 2452; and
(c) receiving from the laboratory a communication indicating the level of at least one target RNA in the sample;
wherein a level of at least one target RNA that is reduced relative to a normal level of the at least one target RNA indicates the presence of lung cancer.

35. The method of claim 34, wherein the sample is provided to a laboratory for detection of the level of at least one second target RNA in the sample, wherein the at least one second target RNA:
(i) is capable of specifically hybridizing to a nucleic acid having a sequence selected from SEQ ID NOs: 1 to 397, 1063 to 1210, 2064 to 2183, 2673 to 2680, and 2689; or
(ii) comprises a sequence that is complementary to at least 15 contiguous nucleotides of a sequence selected from SEQ ID NOs: 1 to 397, 1063 to 1210, 2064 to 2183, 2673 to 2680, and 2689; or
(iii) comprises at least 15 contiguous nucleotides of a sequence selected from SEQ ID NOs: 794 to 1043, 2576 to 2672, and 2692.

36. The method of claim 28, wherein the method further comprises isolating nucleic acids from the sample.

37. The method of claim 36, wherein the nucleic acids comprise RNA that has been separated from DNA.

38. The method of claim 28, wherein at least one target RNA in its mature form comprises fewer than 30 nucleotides.

39. The method of claim 28, wherein at least one target RNA is a microRNA.

40. A synthetic polynucleotide comprising a first region, wherein the first region comprises a sequence of at least 8 contiguous nucleotides that is identical or complementary to a sequence of at least 8 contiguous nucleotides of one of SEQ ID NOs: 1 to 165, 254 to 360, 1063 to 1081, 1090 to 1190, 2064 to 2091, 2107 to 2168, 1363 to 1659, 2312 to 2440, and 2576 to 2680.

41. The synthetic polynucleotide of claim 40, wherein the first region comprises a sequence of at least 9 contiguous nucleotides that is identical or complementary to a sequence of at least 9 contiguous nucleotides of one of SEQ ID NOs: 1 to 165, 254 to 360, 1063 to 1081, 1090 to 1190, 2064 to 2091, 2107 to 2168, 1363 to 1659, 2312 to 2440, and 2576 to 2680.

42. The synthetic polynucleotide of claim 40, wherein the first region comprises a sequence of at least 10 contiguous nucleotides that is identical or complementary to a sequence of at least 10 contiguous nucleotides of one of SEQ ID NOs: 1 to 165, 254 to 360, 1063 to 1081, 1090 to 1190, 2064 to 2091, 2107 to 2168, 1363 to 1659, 2312 to 2440, and 2576 to 2680.

43. The synthetic polynucleotide of claim 40, wherein the first region comprises a sequence of at least 12 contiguous nucleotides that is identical or complementary to a sequence of at least 12 contiguous nucleotides of one of SEQ ID NOs: 1 to 165, 254 to 360, 1063 to 1081, 1090 to 1190, 2064 to 2091, 2107 to 2168, 1363 to 1659, 2312 to 2440, and 2576 to 2680.

44. The synthetic polynucleotide of claim 40, wherein the polynucleotide comprises a detectable label.

45. The synthetic polynucleotide of claim 44, wherein the detectable label is a FRET label.

46. The synthetic polynucleotide of claim 40, wherein the first region is identical or complementary to a region of a target RNA.

47. The synthetic polynucleotide of claim 46, wherein the polynucleotide further comprises a second region that is not identical or complementary to a region of the target RNA.

48. A composition comprising a plurality of synthetic polynucleotides, wherein at least one polynucleotide comprises a first region comprising a sequence of at least 8 contiguous nucleotides that is identical or complementary to a sequence of at least 8 contiguous nucleotides of one or more of SEQ ID NOs: 1 to 165, 254 to 360, 1063 to 1081, 1090 to 1190, 2064 to 2091, 2107 to 2168, 1363 to 1659, 2312 to 2440, and 2576 to 2680.

49. The composition of claim 48, wherein at least two polynucleotides of the plurality of synthetic polynucleotides comprise a first region comprising a sequence of at least 9 contiguous nucleotides that is identical or complementary to a sequence of at least 9 contiguous nucleotides of one or more of SEQ ID NOs: 1 to 165, 254 to 360, 1063 to 1081, 1090 to 1190, 2064 to 2091, 2107 to 2168, 1363 to 1659, 2312 to 2440, and 2576 to 2680, and wherein the first regions of the at least two polynucleotides are different.

50. The composition of claim 48, wherein at least three polynucleotides of the plurality of synthetic polynucleotides comprise a first region comprising a sequence of at least 10 contiguous nucleotides that is identical or complementary to a sequence of at least 10 contiguous nucleotides of one or more of SEQ ID NOs: 1 to 165, 254 to 360, 1063 to 1081, 1090 to 1190, 2064 to 2091, 2107 to 2168, 1363 to 1659, 2312 to 2440, and 2576 to 2680, and wherein the first regions of the at least three polynucleotides are different.

51. The composition of claim 48, wherein at least five polynucleotides of the plurality of synthetic polynucleotides comprise a first region comprising a sequence of at least 12 contiguous nucleotides that is identical or complementary to a sequence of at least 12 contiguous nucleotides of one or more of SEQ ID NOs: 1 to 165, 254 to 360, 1063 to 1081, 1090 to 1190, 2064 to 2091, 2107 to 2168, 1363 to 1659, 2312 to 2440, and 2576 to 2680, and wherein the first regions of the at least five polynucleotides are different.

52. A kit comprising a synthetic polynucleotide of claim 40.

53. A kit comprising a composition of claim 48.

54. The kit of claim 52, wherein the kit further comprises at least one polymerase.

55. The kit of claim 52, wherein the kit further comprises dNTPs.

The application's sequence listing, which the Patent Office published only in electronic form, follows.

SEQUENCE LISTING (2692 sequences)

SEQ ID NO: 1 - DNA, 35 bp, Artificial Sequence
  Synthetic probe
gtcgccccctcccccaagttgagacttgcagctac

SEQ ID NO: 2 - DNA, 45 bp, Artificial Sequence
  Synthetic probe
gctcccctcactgtgaacttttcacccagctaacctgctcctcac

SEQ ID NO: 3 - DNA, 39 bp, Artificial Sequence
  Synthetic probe
aaataatcattccaaatggttctccctgctatgattcac

SEQ ID NO: 4 - DNA, 41 bp, Artificial Sequence
  Synthetic probe
gcggagccgccgccatccccggagccgccgccgccgccgcc

SEQ ID NO: 5 - DNA, 44 bp, Artificial Sequence
  Synthetic probe
tttcctttcctcccctccacaccccatgactccccacacttgag

SEQ ID NO: 6 - DNA, 37 bp, Artificial Sequence
  Synthetic probe
ccgccctccccatagcctcaccccaaacccactcaca

SEQ ID NO: 7 - DNA, 20 bp, Artificial Sequence
  Synthetic probe
ccagaggccccccgccggcc

SEQ ID NO: 8 - DNA, 29 bp, Artificial Sequence
  Synthetic probe
tcattttcttgtcttcttcccttatgcac

SEQ ID NO: 9 - DNA, 19 bp, Artificial Sequence
  Synthetic probe
ctctctcccactttaataa

SEQ ID NO: 10 - DNA, 24 bp, Artificial Sequence
  Synthetic probe
cagccgcctccccctcagcgttaa

SEQ ID NO: 11 - DNA, 33 bp, Artificial Sequence
  Synthetic probe
gcctctcacaaaggatctccttcatccctctcc

SEQ ID NO: 12 - DNA, 32 bp, Artificial Sequence
  Synthetic probe
actccagcctccgccgcctcagcttcccgagc

SEQ ID NO: 13 - DNA, 34 bp, Artificial Sequence
  Synthetic probe
ctataaaacttcgaaaagtccctcctcctcacgt

SEQ ID NO: 14 - DNA, 21 bp, Artificial Sequence
  Synthetic probe
ggcgagagagaaagcccccct

SEQ ID NO: 15 - DNA, 32 bp, Artificial Sequence
  Synthetic probe
gcctgttccctggcatgtactgtaatttatct

SEQ ID NO: 16 - DNA, 25 bp, Artificial Sequence
  Synthetic probe
tcagcgtcttgctctcctcctggta

SEQ ID NO: 17 - DNA, 35 bp, Artificial Sequence
  Synthetic probe
gcacattcccacttccccagaggcaggctccatat

SEQ ID NO: 18 - DNA, 33 bp, Artificial Sequence
  Synthetic probe
gccctacaacttcatcctcaccactcacaccac

SEQ ID NO: 19 - DNA, 31 bp, Artificial Sequence
  Synthetic probe
agtgcccgctcctccgacctccctgcgcacc

SEQ ID NO: 20 - DNA, 33 bp, Artificial Sequence
  Synthetic probe
tccccggccctctccattctcggctccggagca

SEQ ID NO: 21 - DNA, 20 bp, Artificial Sequence
  Synthetic probe
cgtctccctccctcatgtgc

SEQ ID NO: 22 - DNA, 32 bp, Artificial Sequence
  Synthetic probe
tttgacattcagagcactgggcagaaatcaca

SEQ ID NO: 23 - DNA, 33 bp, Artificial Sequence
  Synthetic probe
gtcatagttactcccgccgtttacccgcatttc

SEQ ID NO: 24 - DNA, 31 bp, Artificial Sequence
  Synthetic probe
cctacccccagcatctcctcacgccattgcc

SEQ ID NO: 25 - DNA, 31 bp, Artificial Sequence
  Synthetic probe
agccccctgcccggaaattcaaaacaactgc

SEQ ID NO: 26 - DNA, 29 bp, Artificial Sequence
  Synthetic probe
agcagatgacataactcccccggcatcag

SEQ ID NO: 27 - DNA, 31 bp, Artificial Sequence
  Synthetic probe
gccgactccccccaacacctgcgggtggcac

SEQ ID NO: 28 - DNA, 31 bp, Artificial Sequence
  Synthetic probe
aacctgtctccctcattactagaattctggg

SEQ ID NO: 29 - DNA, 32 bp, Artificial Sequence
  Synthetic probe
tccctttgtgctgcccgagtgccttccccctg

SEQ ID NO: 30 - DNA, 23 bp, Artificial Sequence
  Synthetic probe
gggctgccgggtctcccgcttcc

SEQ ID NO: 31 - DNA, 26 bp, Artificial Sequence
  Synthetic probe
cacagccccttcctgtgacttcacac

SEQ ID NO: 32 - DNA, 36 bp, Artificial Sequence
  Synthetic probe
ctcctcctccccgtctttggataccaaacactggac

SEQ ID NO: 33 - DNA, 21 bp, Artificial Sequence
  Synthetic probe
acagctccctctgctggctcc

SEQ ID NO: 34 - DNA, 30 bp, Artificial Sequence
  Synthetic probe
cttgcaaagggtctccttcatccctctcca

SEQ ID NO: 35 - DNA, 32 bp, Artificial Sequence
  Synthetic probe
catttttccccttccttcctctatatcagcaa

SEQ ID NO: 36 - DNA, 34 bp, Artificial Sequence
  Synthetic probe
caccaccaaaccaaatgccgctgctctccttcca

SEQ ID NO: 37 - DNA, 34 bp, Artificial Sequence
  Synthetic probe
gtcttgggtgggccctccccagagcacaccctct

SEQ ID NO: 38 - DNA, 29 bp, Artificial Sequence
  Synthetic probe
ccccaccccctcatcagctgctcccagat

SEQ ID NO: 39 - DNA, 31 bp, Artificial Sequence
  Synthetic probe
ggccctccccctgcctgtgataggctgcttg

SEQ ID NO: 40 - DNA, 32 bp, Artificial Sequence
  Synthetic probe
gccatggaacaccgtgcctgcccctctcgaga

SEQ ID NO: 41 - DNA, 29 bp, Artificial Sequence
  Synthetic probe
taataaaatatcttctcactgtgcccttg

SEQ ID NO: 42 - DNA, 19 bp, Artificial Sequence
  Synthetic probe
gattccagccccttccccc

SEQ ID NO: 43 - DNA, 34 bp, Artificial Sequence
  Synthetic probe
ctgccctccaagaaataaattacccgcaattact

SEQ ID NO: 44 - DNA, 33 bp, Artificial Sequence
  Synthetic probe
cattaacccccattatcacagcacgccccattc

SEQ ID NO: 45 - DNA, 27 bp, Artificial Sequence
  Synthetic probe
ccctccctctccgaaagaatgtgtcac

SEQ ID NO: 46 - DNA, 22 bp, Artificial Sequence
  Synthetic probe
ctgctcagcctcccacatctgt

SEQ ID NO: 47 - DNA, 31 bp, Artificial Sequence
  Synthetic probe
acaatacccccacctttttcctgtaccttac

SEQ ID NO: 48 - DNA, 30 bp, Artificial Sequence
  Synthetic probe
aaactccagcagccccgtcagcctcctgct

SEQ ID NO: 49 - DNA, 33 bp, Artificial Sequence
  Synthetic probe
gcaattccctttcctccatctccaattttcctc

SEQ ID NO: 50 - DNA, 19 bp, Artificial Sequence
  Synthetic probe
tgttttaatcctgccccgt

SEQ ID NO: 51 - DNA, 32 bp, Artificial Sequence
  Synthetic probe
gattccacttttcttaatgactttcccctcct

SEQ ID NO: 52 - DNA, 25 bp, Artificial Sequence
  Synthetic probe
agataaaaaaccacccacccagcac

SEQ ID NO: 53 - DNA, 30 bp, Artificial Sequence
  Synthetic probe
aaaattagatttccactttatccttctccc

SEQ ID NO: 54 - DNA, 31 bp, Artificial Sequence
  Synthetic probe
gctccaaaaatccatttaatatattgtcctt

SEQ ID NO: 55 - DNA, 31 bp, Artificial Sequence
  Synthetic probe
gccccgccccacctttcggggctcacctggc

SEQ ID NO: 56 - DNA, 32 bp, Artificial Sequence
  Synthetic probe
cgttcccaaccgcacgcgccgccttctggaac

SEQ ID NO: 57 - DNA, 27 bp, Artificial Sequence
  Synthetic probe
agccctcccaccagccagctgcagtgc

SEQ ID NO: 58 - DNA, 31 bp, Artificial Sequence
  Synthetic probe
cgcttcgggatcctctccaactgcaaccaca

SEQ ID NO: 59 - DNA, 49 bp, Artificial Sequence
  Synthetic probe
cccatcccccatatgacgcttccccctcctaacctcaccacccccagca

SEQ ID NO: 60 - DNA, 33 bp, Artificial Sequence
  Synthetic probe
cccctcccccacccaccacttcccctagagtcc

SEQ ID NO: 61 - DNA, 21 bp, Artificial Sequence
  Synthetic probe
tcggccctgcctcctcctcct

SEQ ID NO: 62 - DNA, 34 bp, Artificial Sequence
  Synthetic probe
agagccccagtggaaatctctcctccaaatccat

SEQ ID NO: 63 - DNA, 32 bp, Artificial Sequence
  Synthetic probe
cacgtcctcccctcccctcgaggtgtcacaca

SEQ ID NO: 64 - DNA, 31 bp, Artificial Sequence
  Synthetic probe
cctgttttctcccctctctctctgcccctcc

SEQ ID NO: 65 - DNA, 23 bp, Artificial Sequence
  Synthetic probe
aaaataaactcttcctgctcaag

SEQ ID NO: 66 - DNA, 21 bp, Artificial Sequence
  Synthetic probe
ccctcctttccccacctcagt

SEQ ID NO: 67 - DNA, 35 bp, Artificial Sequence
  Synthetic probe
cttcccgaggccacatgcttctttatatccccata

SEQ ID NO: 68 - DNA, 32 bp, Artificial Sequence
  Synthetic probe
gctccctctctggttggacctcacccaaagat

SEQ ID NO: 69 - DNA, 29 bp, Artificial Sequence
  Synthetic probe
gcccgctgggccctgccacccccacccct

SEQ ID NO: 70 - DNA, 31 bp, Artificial Sequence
  Synthetic probe
acctcccccgcgaagacatccacattctgca

SEQ ID NO: 71 - DNA, 32 bp, Artificial Sequence
  Synthetic probe
gtgtcttctccccaaccagccagctctcctgg

SEQ ID NO: 72 - DNA, 22 bp, Artificial Sequence
  Synthetic probe
attaatccttctctcccctctg

SEQ ID NO: 73 - DNA, 42 bp, Artificial Sequence
  Synthetic probe
ccccctgcccaagcatttgcttgggcaccaaagtccctgcaa

SEQ ID NO: 74 - DNA, 32 bp, Artificial Sequence
  Synthetic probe
cctgatcgaaaacctcacccaccagatccggg

SEQ ID NO: 75 - DNA, 20 bp, Artificial Sequence
  Synthetic probe
atggaaaccccacccttccc

SEQ ID NO: 76 - DNA, 43 bp, Artificial Sequence
  Synthetic probe
caaggcccgtagcctgaaaaaagatgcccccaccagccctgcc

SEQ ID NO: 77 - DNA, 29 bp, Artificial Sequence
  Synthetic probe
gcacacccgctctccggcccgcgcccctg

SEQ ID NO: 78 - DNA, 40 bp, Artificial Sequence
  Synthetic probe
tctgggtaactagccgtttccgtcaccttcccctgccccc

SEQ ID NO: 79 - DNA, 42 bp, Artificial Sequence
  Synthetic probe
gcaaagcacttccccctctaagtctgcctgggctcttggcac

SEQ ID NO: 80 - DNA, 35 bp, Artificial Sequence
  Synthetic probe
taaatagcttctgaacctccctgcattctaattgc

SEQ ID NO: 81 - DNA, 34 bp, Artificial Sequence
  Synthetic probe
gcccctgccagaatcctctaacagctctaattgg

SEQ ID NO: 82 - DNA, 22 bp, Artificial Sequence
  Synthetic probe
accgcgacatagcctcgccccc

SEQ ID NO: 83 - DNA, 29 bp, Artificial Sequence
  Synthetic probe
gaagctccgcggcgacgtcccgttactcc

SEQ ID NO: 84 - DNA, 29 bp, Artificial Sequence
  Synthetic probe
agggttagagctgccccctctggggaccg

SEQ ID NO: 85 - DNA, 30 bp, Artificial Sequence
  Synthetic probe
ctcgcaaaggatctccttcatccctcccca

SEQ ID NO: 86 - DNA, 32 bp, Artificial Sequence
  Synthetic probe
agtcccctgcctcatctgccacccctaatgac

SEQ ID NO: 87 - DNA, 30 bp, Artificial Sequence
  Synthetic probe
taaagagacttcctccactgccagagatct

SEQ ID NO: 88 - DNA, 29 bp, Artificial Sequence
  Synthetic probe
tgggagacgaacacctcctgctgtgcttg

SEQ ID NO: 89 - DNA, 31 bp, Artificial Sequence
  Synthetic probe
tcaggccacaaagctacccccaagacaggcc

SEQ ID NO: 90 - DNA, 20 bp, Artificial Sequence
  Synthetic probe
agggctcccccacccctaag

SEQ ID NO: 91 - DNA, 26 bp, Artificial Sequence
  Synthetic probe
atcacccttccccctcccaaataaag

SEQ ID NO: 92 - DNA, 30 bp, Artificial Sequence
  Synthetic probe
cgcagtgcacaccctgagctacagcccctc

SEQ ID NO: 93 - DNA, 28 bp, Artificial Sequence
  Synthetic probe
cccggcctccgcctggcccgagcgataa

SEQ ID NO: 94 - DNA, 29 bp, Artificial Sequence
  Synthetic probe
cccagagaaccggaattcctccccgcccc

SEQ ID NO: 95 - DNA, 32 bp, Artificial Sequence
  Synthetic probe
catccctctccagaagaggagaagaggaaaca

SEQ ID NO: 96 - DNA, 33 bp, Artificial Sequence
  Synthetic probe
ccctctctgcctctctcatcaccaataacagac

SEQ ID NO: 97 - DNA, 32 bp, Artificial Sequence
  Synthetic probe
ggaactgcttctccttgctccagtcattgaag

SEQ ID NO: 98 - DNA, 31 bp, Artificial Sequence
  Synthetic probe
tcagcgcaacaagccccgcagtcacccctct

SEQ ID NO: 99 - DNA, 29 bp, Artificial Sequence
  Synthetic probe
ccattccccaccctcaggtagtaaaaata

SEQ ID NO: 100 - DNA, 30 bp, Artificial Sequence
  Synthetic probe
aacagaaatgattatttacctccccacatg

SEQ ID NO: 101 - DNA, 24 bp, Artificial Sequence
  Synthetic probe
cagccgcctctccctcagcgttaa

SEQ ID NO: 102 - DNA, 31 bp, Artificial Sequence
  Synthetic probe
gattaaaaacaagaatctatcttcccccagt

SEQ ID NO: 103 - DNA, 30 bp, Artificial Sequence
  Synthetic probe
agcccctccccagctgcagctgagggctgg

SEQ ID NO: 104 - DNA, 20 bp, Artificial Sequence
  Synthetic probe
atcagggtatcctctcccca

SEQ ID NO: 105 - DNA, 24 bp, Artificial Sequence
  Synthetic probe
cccccgccctgcccatctccgact

SEQ ID NO: 106 - DNA, 30 bp, Artificial Sequence
  Synthetic probe
aaatggctcctttcccctttccctccaccg

SEQ ID NO: 107 - DNA, 23 bp, Artificial Sequence
  Synthetic probe
cccttcaccccagttgccaaaca

SEQ ID NO: 108 - DNA, 35 bp, Artificial Sequence
  Synthetic probe
cccggcgcccctcgccggctccaaactttccccaa

SEQ ID NO: 109 - DNA, 33 bp, Artificial Sequence
  Synthetic probe
gccaagcttggaacctctccctgccagcatcac

SEQ ID NO: 110 - DNA, 23 bp, Artificial Sequence
  Synthetic probe
tcattcatgccccatcctgccag

SEQ ID NO: 111 - DNA, 34 bp, Artificial Sequence
  Synthetic probe
ccaaagacccctttctcccagcctgtttctgcaa

SEQ ID NO: 112 - DNA, 19 bp, Artificial Sequence
  Synthetic probe
cggacgcccgctcccgcca

SEQ ID NO: 113 - DNA, 29 bp, Artificial Sequence
  Synthetic probe
aaacaaacacccaagctccccacaccatc

SEQ ID NO: 114 - DNA, 33 bp, Artificial Sequence
  Synthetic probe
ttcttgccctccaatccccgggctccaccagcc

SEQ ID NO: 115 - DNA, 34 bp, Artificial Sequence
  Synthetic probe
ctgccctccctcttgatcaagactgctctcctaa

SEQ ID NO: 116 - DNA, 33 bp, Artificial Sequence
  Synthetic probe
ggaaaagaaaccctcccagtccattcccttcct

SEQ ID NO: 117 - DNA, 33 bp, Artificial Sequence
  Synthetic probe
acgatccccgccgtgactaaagccaacagtgga

SEQ ID NO: 118 - DNA, 32 bp, Artificial Sequence
  Synthetic probe
aacctctcattagccagccactcgctcccaag

SEQ ID NO: 119 - DNA, 32 bp, Artificial Sequence
  Synthetic probe
gatattcagagccctccccagcccacacatgc

SEQ ID NO: 120 - DNA, 31 bp, Artificial Sequence
  Synthetic probe
gcccaatatgcattttacattttaacaaaga

SEQ ID NO: 121 - DNA, 31 bp, Artificial Sequence
  Synthetic probe
gtgatgcagaggacttcctgctccaggtctc

SEQ ID NO: 122 - DNA, 35 bp, Artificial Sequence
  Synthetic probe
tccatccttgccgtcgccttcatctcaaagccatc

SEQ ID NO: 123 - DNA, 33 bp, Artificial Sequence
  Synthetic probe
cagctgccagggagacatagaaattaaaaacaa

SEQ ID NO: 124 - DNA, 20 bp, Artificial Sequence
  Synthetic probe
gtctccctcatccatcatcc

SEQ ID NO: 125 - DNA, 22 bp, Artificial Sequence
  Synthetic probe
gccgcccgccgggcaccgggcc

SEQ ID NO: 126 - DNA, 27 bp, Artificial Sequence
  Synthetic probe
cttagacttccttcccactccctgcat

SEQ ID NO: 127 - DNA, 33 bp, Artificial Sequence
  Synthetic probe
gcccttaaagtacatactgtggagattaatgct

SEQ ID NO: 128 - DNA, 40 bp, Artificial Sequence
  Synthetic probe
aatcatccatttcatccgcatctccctcttggccccttgc

SEQ ID NO: 129 - DNA, 32 bp, Artificial Sequence
  Synthetic probe
aaggctgtccctcaccagacttccccacccct

SEQ ID NO: 130 - DNA, 33 bp, Artificial Sequence
  Synthetic probe
ccgccccctcaccgcctcctgctcccatcaggc

SEQ ID NO: 131 - DNA, 33 bp, Artificial Sequence
  Synthetic probe
ctggccctttaagagcctctccgcgcgctgccg

SEQ ID NO: 132 - DNA, 33 bp, Artificial Sequence
  Synthetic probe
ttcaggtttttataaatcaggatgtcaacaaat

SEQ ID NO: 133 - DNA, 35 bp, Artificial Sequence; identical to SEQ ID NO: 108
  Synthetic probe

SEQ ID NO: 134 - DNA, 19 bp, Artificial Sequence
  Synthetic probe
aactcagctgccttccgcc

SEQ ID NO: 135 - DNA, 35 bp, Artificial Sequence
  Synthetic probe
agcctgctccgctctcccctcccaccagaaaaagt

SEQ ID NO: 136 - DNA, 28 bp, Artificial Sequence
  Synthetic probe
ctttgctctctcttctgttatctggacc

SEQ ID NO: 137 - DNA, 27 bp, Artificial Sequence
  Synthetic probe
cctgctcctagcaaccaggagccacaa

SEQ ID NO: 138 - DNA, 30 bp, Artificial Sequence
  Synthetic probe
agaaaataagttagctatgtaacaaattga

SEQ ID NO: 139 - DNA, 33 bp, Artificial Sequence
  Synthetic probe
gtgcagcagcccgcgccagcctccgcagccgcc

SEQ ID NO: 140 - DNA, 30 bp, Artificial Sequence
  Synthetic probe
tgaactttagctgggccgccgcctgtcagc

SEQ ID NO: 141 - DNA, 32 bp, Artificial Sequence
  Synthetic probe
ggaagaagcccttccgcttccaccccgaacac

SEQ ID NO: 142 - DNA, 30 bp, Artificial Sequence
  Synthetic probe
tgtgccctgcccaccccctcccctgccccg

SEQ ID NO: 143 - DNA, 34 bp, Artificial Sequence
  Synthetic probe
cactcccctcctttttaattagaaagcactaaga

SEQ ID NO: 144 - DNA, 32 bp, Artificial Sequence
  Synthetic probe
cccgccgccggagcatctcgaagttaattaaa

SEQ ID NO: 145 - DNA, 35 bp, Artificial Sequence
  Synthetic probe
aaacaccacccacgctcttgctacaagacccacat

SEQ ID NO: 146 - DNA, 35 bp, Artificial Sequence
  Synthetic probe
gacaccgcccgctactttgttaatgaaaagccccc

SEQ ID NO: 147 - DNA, 23 bp, Artificial Sequence
  Synthetic probe
gccccttctttatattgccaaga

SEQ ID NO: 148 - DNA, 67 bp, Artificial Sequence
  Synthetic probe
cctccgcccccacactgcatccttgcccagtttggctgccatcagtattgtcccctgagaactggac

SEQ ID NO: 149 - DNA, 46 bp, Artificial Sequence
  Synthetic probe
gacctcagcgtgccccctttcaaccacagacgaatattgtgtacaa

SEQ ID NO: 150 - DNA, 39 bp, Artificial Sequence
  Synthetic probe
cccagaagacatcagacagagttgtttcttctccctcta

SEQ ID NO: 151 - DNA, 60 bp, Artificial Sequence
  Synthetic probe
gcagcccctcctccgagaggttgggggtcgcggccgcccggccctcccggtcccctcccc

SEQ ID NO: 152 - DNA, 36 bp, Artificial Sequence
  Synthetic probe
ggaaagtcagcccccagcgccccccggagttcttgg

SEQ ID NO: 153 - DNA, 39 bp, Artificial Sequence
  Synthetic probe
cccccaccaaacctattcccgcatcctccccggctctgg

SEQ ID NO: 154 - DNA, 30 bp, Artificial Sequence
  Synthetic probe
aacccgggctcccccacccgctccctgagc

SEQ ID NO: 155 - DNA, 52 bp, Artificial Sequence
  Synthetic probe
acacctctgcgcccctcaggcgccctgggcctcggcgccccgcccgtcccag

SEQ ID NO: 156 - DNA, 55 bp, Artificial Sequence
  Synthetic probe
tcccagggggccctgaacttgtcaaatcctcgccatcctccacccccagccccgg

SEQ ID NO: 157 - DNA, 54 bp, Artificial Sequence
  Synthetic probe
gccgagcccccgcccccgccgggatgctgccctccggaaggaggggcgctgccc

SEQ ID NO: 158 - DNA, 38 bp, Artificial Sequence
  Synthetic probe
tggcgccctcccccgcccggggctcagcctctcacctg

SEQ ID NO: 159 - DNA, 42 bp, Artificial Sequence
  Synthetic probe
cagagcccgctctcgcgaccgacctgccgccgaccgccacag

SEQ ID NO: 160 - DNA, 69 bp, Artificial Sequence
  Synthetic probe
aatacggacaagccccactccctcattagcataaaaaacaaagtacttccgacctccccgcccgcccgc

SEQ ID NO: 161 - DNA, 54 bp, Artificial Sequence
  Synthetic probe
ccccttgtcacccccagccccttcctggccaggaccccagcgaggcccagagaa

SEQ ID NO: 162 - DNA, 60 bp, Artificial Sequence
  Synthetic probe
tcctcactgggccccaccaaaactgtgccaccccctcaagcccccaggagcttccttaac

SEQ ID NO: 163 - DNA, 42 bp, Artificial Sequence
  Synthetic probe
catatttttgtgttgctgagtatttggggtttgctcgcccgt

SEQ ID NO: 164 - DNA, 58 bp, Artificial Sequence
  Synthetic probe
aaaccaaaaaaaaaaaattaaaaagcgacgaaaatgcaattgtgtgccttctccctcc

SEQ ID NO: 165 - DNA, 55 bp, Artificial Sequence
  Synthetic probe
cccgagcccggcgccctgtgttgtgctccgctctccgggaaatgccatcactaat

SEQ ID NO: 166 - DNA, 22 bp, Artificial Sequence
  Synthetic probe
aactatacaacctactacctca

SEQ ID NO: 167 - DNA, 22 bp, Artificial Sequence
  Synthetic probe
aaccacacaacctactacctca

SEQ ID NO: 168 - DNA, 22 bp, Artificial Sequence
  Synthetic probe
aaccatacaacctactacctca

SEQ ID NO: 169 - DNA, 22 bp, Artificial Sequence
  Synthetic probe
aactatgcaacctactacctct

SEQ ID NO: 170 - DNA, 22 bp, Artificial Sequence
  Synthetic probe
aactatacaacctcctacctca

SEQ ID NO: 171 - DNA, 22 bp, Artificial Sequence
  Synthetic probe
aactatacaatctactacctca

SEQ ID NO: 172 - DNA, 22 bp, Artificial Sequence
  Synthetic probe
aactgtacaaactactacctca

SEQ ID NO: 173 - DNA, 22 bp, Artificial Sequence
  Synthetic probe
aacagcacaaactactacctca

SEQ ID NO: 174 - DNA, 22 bp, Artificial Sequence
  Synthetic probe
cacaagttcggatctacgggtt

SEQ ID NO: 175 - DNA, 19 bp, Artificial Sequence
  Synthetic probe
ccacctcccgagtcctcac

SEQ ID NO: 176 - DNA, 22 bp, Artificial Sequence
  Synthetic probe
ccccccactgggccgtacccac

SEQ ID NO: 177 - DNA, 21 bp, Artificial Sequence
  Synthetic probe
cacacacctgcccccgcccac

SEQ ID NO: 178 - DNA, 24 bp, Artificial Sequence
  Synthetic probe
tcacaggttaaagggtctcaggga

SEQ ID NO: 179 - DNA, 22 bp, Artificial Sequence
  Synthetic probe
tcacaagttagggtctcaggga

SEQ ID NO: 180 - DNA, 22 bp, Artificial Sequence
  Synthetic probe
cgcattattactcacggtacga

SEQ ID NO: 181 - DNA, 22 bp, Artificial Sequence
  Synthetic probe
cgccacggctccaatccctata

SEQ ID NO: 182 - DNA, 23 bp, Artificial Sequence
  Synthetic probe
tccataaagtaggaaacactaca

SEQ ID NO: 183 - DNA, 23 bp, Artificial Sequence
  Synthetic probe
agggattcctgggaaaactggac

SEQ ID NO: 184 - DNA, 22 bp, Artificial Sequence
  Synthetic probe
agcctatggaattcagttctca

SEQ ID NO: 185 - DNA, 21 bp, Artificial Sequence
  Synthetic probe
gcacagcccccgtccctccct

SEQ ID NO: 186 - DNA, 22 bp, Artificial Sequence
  Synthetic probe
ctgtcccccaggcctgtaccag

SEQ ID NO: 187 - DNA, 23 bp, Artificial Sequence
  Synthetic probe
acccctatcacgattagcattaa

SEQ ID NO: 188 - DNA, 22 bp, Artificial Sequence
  Synthetic probe
cgccaatatttacgtgctgcta

SEQ ID NO: 189 - DNA, 22 bp, Artificial Sequence
  Synthetic probe
actcaccgacaggttgaatgtt

SEQ ID NO: 190 - DNA, 22 bp, Artificial Sequence
  Synthetic probe
gaacctatctcccctctggacc

SEQ ID NO: 191 - DNA, 22 bp, Artificial Sequence
  Synthetic probe
taaccaatgtgcagactactgt

SEQ ID NO: 192 - DNA, 23 bp, Artificial Sequence
  Synthetic probe
tcagttttgcatggatttgcaca

SEQ ID NO: 193 - DNA, 22 bp, Artificial Sequence
  Synthetic probe
tcatcattaccaggcagtatta

SEQ ID NO: 194 - DNA, 23 bp, Artificial Sequence
  Synthetic probe
tccatcattacccggcagtatta

SEQ ID NO: 195 - DNA, 22 bp, Artificial Sequence
  Synthetic probe
cagactccggtggaatgaagga

SEQ ID NO: 196 - DNA, 22 bp, Artificial Sequence
  Synthetic probe
tcaacatcagtctgataagcta

SEQ ID NO: 197 - DNA, 21 bp, Artificial Sequence
  Synthetic probe
ggaaatccctggcaatgtgat

SEQ ID NO: 198 - DNA, 22 bp, Artificial Sequence
  Synthetic probe
aaatcccatccccaggaacccc

SEQ ID NO: 199 - DNA, 21 bp, Artificial Sequence
  Synthetic probe
ggtaatccctggcaatgtgat

SEQ ID NO: 200 - DNA, 22 bp, Artificial Sequence
  Synthetic probe
ctgttcctgctgaactgagcca

SEQ ID NO: 201 - DNA, 21 bp, Artificial Sequence
  Synthetic probe
caattgcccaagtctccgcct

SEQ ID NO: 202 - DNA, 22 bp, Artificial Sequence
  Synthetic probe
agcctatcctggattacttgaa

SEQ ID NO: 203 - DNA, 21 bp, Artificial Sequence
  Synthetic probe
acctatcctgaattacttgaa

SEQ ID NO: 204 - DNA, 21 bp, Artificial Sequence
  Synthetic probe
gcggaacttagccactgtgaa

SEQ ID NO: 205 - DNA, 21 bp, Artificial Sequence
  Synthetic probe
gcagaacttagccactgtgaa

SEQ ID NO: 206 - DNA, 24 bp, Artificial Sequence
  Synthetic probe
tgggagaacctccctgcttctgct

SEQ ID NO: 207 - DNA, 22 bp, Artificial Sequence
  Synthetic probe
taaccgatttcagatggtgcta

SEQ ID NO: 208 - DNA, 23 bp, Artificial Sequence
  Synthetic probe
aacactgatttcaaatggtgcta

SEQ ID NO: 209 - DNA, 22 bp, Artificial Sequence
  Synthetic probe
taaccgatttcaaatggtgcta

SEQ ID NO: 210 - DNA, 22 bp, Artificial Sequence
  Synthetic probe
cttccagtcgaggatgtttaca

SEQ ID NO: 211 - DNA, 22 bp, Artificial Sequence
  Synthetic probe
agctgagtgtaggatgtttaca

SEQ ID NO: 212 - DNA, 22 bp, Artificial Sequence
  Synthetic probe
gaagtaaacatccacctcccag

SEQ ID NO: 213 - DNA, 23 bp, Artificial Sequence
  Synthetic probe
gctgagagtgtaggatgtttaca

SEQ ID NO: 214 - DNA, 22 bp, Artificial Sequence
  Synthetic probe
ggagtaaacaaccctctcccag

SEQ ID NO: 215 - DNA, 23 bp, Artificial Sequence
  Synthetic probe
gctgagagtgtaggatgtttaca

SEQ ID NO: 216 - DNA, 22 bp, Artificial Sequence
  Synthetic probe
cttccagtcggggatgtttaca

SEQ ID NO: 217 - DNA, 22 bp, Artificial Sequence
  Synthetic probe
cttccagtcaaggatgtttaca

SEQ ID NO: 218 - DNA, 22 bp, Artificial Sequence
  Synthetic probe
tcgccctctcaacccagctttt

SEQ ID NO: 219 - DNA, 21 bp, Artificial Sequence
  Synthetic probe
ttctaggataggcccaggggc

SEQ ID NO: 220 - DNA, 20 bp, Artificial Sequence
  Synthetic probe
agtgcccccacagtttgagt

SEQ ID NO: 221 - DNA, 22 bp, Artificial Sequence
  Synthetic probe
ggaaagcgcccccattttgagt

SEQ ID NO: 222 - DNA, 22 bp, Artificial Sequence
  Synthetic probe
tcacgcgagccgaacgaacaaa

SEQ ID NO: 223 - DNA, 23 bp, Artificial Sequence
  Synthetic probe
aaagtctcgctctctgcccctca

SEQ ID NO: 224 - DNA, 22 bp, Artificial Sequence
  Synthetic probe
ttcaaaacatgaattgctgctg

SEQ ID NO: 225 - DNA, 22 bp, Artificial Sequence
  Synthetic probe
ctcccttctttcctcccgtctt

SEQ ID NO: 226 - DNA, 21 bp, Artificial Sequence
  Synthetic probe
atcctgtactgagctgccccg

SEQ ID NO: 227 - DNA, 22 bp, Artificial Sequence
  Synthetic probe
gtagaagggaatcttgcataag

SEQ ID NO: 228 - DNA, 22 bp, Artificial Sequence
  Synthetic probe
cctcatggaagggttccccact

SEQ ID NO: 229 - DNA, 18 bp, Artificial Sequence
  Synthetic probe
atgacacctccctgtgaa

SEQ ID NO: 230 - DNA, 22 bp, Artificial Sequence
  Synthetic probe
ataaatgacacctccttgtgaa

SEQ ID NO: 231 - DNA, 23 bp, Artificial Sequence
  Synthetic probe
gaaagtgcttctttcctcgagaa

SEQ ID NO: 232 - DNA, 23 bp, Artificial Sequence
  Synthetic probe
gggctcttactccctcaggcact

SEQ ID NO: 233 - DNA, 23 bp, Artificial Sequence
  Synthetic probe
agacaaggcccacccgtgcaaac

SEQ ID NO: 234 - DNA, 19 bp, Artificial Sequence
  Synthetic probe
gctcctgtccaactggctc

SEQ ID NO: 235 - DNA, 25 bp, Artificial Sequence
  Synthetic probe
aaggagctcagaagccctgcccagc

SEQ ID NO: 236 - DNA, 23 bp, Artificial Sequence
  Synthetic probe
ccacctggcaagaacaggcgttc

SEQ ID NO: 237 - DNA, 22 bp, Artificial Sequence
  Synthetic probe
accttccctggtacagaatact

SEQ ID NO: 238 - DNA, 24 bp, Artificial Sequence
  Synthetic probe
acgcagagcccgaaagcccccagt

SEQ ID NO: 239 - DNA, 25 bp, Artificial Sequence
  Synthetic probe
aggccgccacccgcccgcgatccct

SEQ ID NO: 240 - DNA, 25 bp, Artificial Sequence
  Synthetic probe
accaacggacctacttccctccgcc

SEQ ID NO: 241 - DNA, 22 bp, Artificial Sequence
  Synthetic probe
gcggtcccgcggcgccccgcct

SEQ ID NO: 242 - DNA, 23 bp, Artificial Sequence
  Synthetic probe
ctccagcccctccagggcttcct

SEQ ID NO: 243 - DNA, 23 bp, Artificial Sequence
  Synthetic probe
cactgtgggccctctccgcacca

SEQ ID NO: 244 - DNA, 23 bp, Artificial Sequence
  Synthetic probe
cccagctagattgtaagctcctt

SEQ ID NO: 245 - DNA, 22 bp, Artificial Sequence
  Synthetic probe
tgctgttagccctagccccgca

SEQ ID NO: 246 - DNA, 21 bp, Artificial Sequence
  Synthetic probe
catcaccttccttctcctcca

SEQ ID NO: 247 - DNA, 20 bp, Artificial Sequence
  Synthetic probe
tactgcttccacagctcccc

SEQ ID NO: 248 - DNA, 21 bp, Artificial Sequence
  Synthetic probe
agtttcttttcctccgctgac

SEQ ID NO: 249 - DNA, 22 bp, Artificial Sequence
  Synthetic probe
gtaatgcaacaaatccccaccc

SEQ ID NO: 250 - DNA, 22 bp, Artificial Sequence
  Synthetic probe
cactgcaccgcgtcccgtccct

SEQ ID NO: 251 - DNA, 23 bp, Artificial Sequence
  Synthetic probe
ctacctgcacgaacagcactttg

SEQ ID NO: 252 - DNA, 22 bp, Artificial Sequence
  Synthetic probe
aacaatacaacttactacctca

SEQ ID NO: 253 - DNA, 22 bp, Artificial Sequence
  Synthetic probe
cgcaaggtcggttctacgggtg

SEQ ID NO: 254 - DNA, 36 bp, Artificial Sequence
  Synthetic probe
tgcaggctccactgacattttcacaatttaaatcat

SEQ ID NO: 255 - DNA, 28 bp, Artificial Sequence
  Synthetic probe
cccccacccctctgtggggccatccctg

SEQ ID NO: 256 - DNA, 35 bp, Artificial Sequence
  Synthetic probe
gagctcccaaccctcctttatgttttgtctaaagc

SEQ ID NO: 257 - DNA, 30 bp, Artificial Sequence
  Synthetic probe
tgaatattatccctaatacctgccacccca

SEQ ID NO: 258 - DNA, 32 bp, Artificial Sequence
  Synthetic probe
aacatatgtaaacccctttattcctcattctg

SEQ ID NO: 259 - DNA, 32 bp, Artificial Sequence
  Synthetic probe
gcgcacagagcactcaatctgacacccctcgc

SEQ ID NO: 260 - DNA, 35 bp, Artificial Sequence
  Synthetic probe
tcatactcctgcttgctgatccacatctgctggaa

SEQ ID NO: 261 - DNA, 27 bp, Artificial Sequence
  Synthetic probe
catagctgaattccatcccagccccag

SEQ ID NO: 262 - DNA, 35 bp, Artificial Sequence; identical to SEQ ID NO: 260
  Synthetic probe

SEQ ID NO: 263 - DNA, 31 bp, Artificial Sequence
  Synthetic probe
gccagcacgccgtccatgtccaccagcaccc

SEQ ID NO: 264 - DNA, 32 bp, Artificial Sequence
  Synthetic probe
agaccggactcgcctcttccaactcgagttca

SEQ ID NO: 265 - DNA, 34 bp, Artificial Sequence
  Synthetic probe
agttcagcagcccagtggacatgctgggggtggt

SEQ ID NO: 266 - DNA, 30 bp, Artificial Sequence
  Synthetic probe
acttcatcctcaccactcacaccaccctag

SEQ ID NO: 267 - DNA, 30 bp, Artificial Sequence
  Synthetic probe
tccctcccttatacacagatcaattccccc

SEQ ID NO: 268 - DNA, 30 bp, Artificial Sequence
  Synthetic probe
attttccagccccttgtccccaggccaaac

SEQ ID NO: 269 - DNA, 30 bp, Artificial Sequence
  Synthetic probe
gccaaattctcaaccaatataactctgtga

SEQ ID NO: 270 - DNA, 26 bp, Artificial Sequence
  Synthetic probe
ggcacctccagctacagtaaacaaat

SEQ ID NO: 271 - DNA, 21 bp, Artificial Sequence
  Synthetic probe
gctcatcaaaaagttccctgt

SEQ ID NO: 272 - DNA, 31 bp, Artificial Sequence
  Synthetic probe
tactcccgccgtttacccgcatttcactgaa

SEQ ID NO: 273 - DNA, 29 bp, Artificial Sequence
  Synthetic probe
ttcagagcactgggcagaaatcacatcac

SEQ ID NO: 274 - DNA, 33 bp, Artificial Sequence
  Synthetic probe
gagatccagacggccgtgcgcctgctgctgcct

SEQ ID NO: 275 - DNA, 26 bp, Artificial Sequence
  Synthetic probe
atctgcccagttcccagcacactccc

SEQ ID NO: 276 - DNA, 33 bp, Artificial Sequence
  Synthetic probe
ggcttcacttgcctcctgcaaaacaccaatagc

SEQ ID NO: 277 - DNA, 28 bp, Artificial Sequence
  Synthetic probe
gccctctggcccctgcctaattggctgc

SEQ ID NO: 278 - DNA, 35 bp, Artificial Sequence
  Synthetic probe
cttggcatctctagcaccttcagctttctgtgcct

SEQ ID NO: 279 - DNA, 33 bp, Artificial Sequence
  Synthetic probe
ccaaagccttagacaagtgccaagcccatcttt

SEQ ID NO: 280 - DNA, 34 bp, Artificial Sequence
  Synthetic probe
aactctgcctcctgtttgctacaaaaacattaat

SEQ ID NO: 281 - DNA, 35 bp, Artificial Sequence
  Synthetic probe
agggctaacttctgaaaacccaccaaattccccaa

SEQ ID NO: 282 - DNA, 29 bp, Artificial Sequence
  Synthetic probe
ccccagtcccagcccaattaataaatggg

SEQ ID NO: 283 - DNA, 29 bp, Artificial Sequence
  Synthetic probe
ccccttccttcctctatatcagcaaagac

SEQ ID NO: 284 - DNA, 31 bp, Artificial Sequence
  Synthetic probe
cctctgaccccagctctggccctttctaggg

SEQ ID NO: 285 - DNA, 29 bp, Artificial Sequence
  Synthetic probe
ctcaacctctgggactatgtcctgtctcc

SEQ ID NO: 286 - DNA, 33 bp, Artificial Sequence
  Synthetic probe
ccctctgttttcaacttacacaagattcttttt

SEQ ID NO: 287 - DNA, 34 bp, Artificial Sequence
  Synthetic probe
ggctcccagatgtgtcccacattgaagaattatc

SEQ ID NO: 288 - DNA, 34 bp, Artificial Sequence
  Synthetic probe
gccaagctccaagtcagtatagctaacagagcag

SEQ ID NO: 289 - DNA, 34 bp, Artificial Sequence
  Synthetic probe
ctcctctcacctggccagactctgacccacctac

SEQ ID NO: 290 - DNA, 32 bp, Artificial Sequence
  Synthetic probe
caactgttctccatgatgcctcagagccactt

SEQ ID NO: 291 - DNA, 34 bp, Artificial Sequence
  Synthetic probe
ctcccacctccgtgaagctatttttaactgtgca

SEQ ID NO: 292 - DNA, 31 bp, Artificial Sequence
  Synthetic probe
tcccagcccaccagtgccacattacagccca

SEQ ID NO: 293 - DNA, 33 bp, Artificial Sequence
  Synthetic probe
aatgccagttctgctcaatcttccctcaatgag

SEQ ID NO: 294 - DNA, 32 bp, Artificial Sequence
  Synthetic probe
ctcacccagctcatcctgcttctcagtcccac

SEQ ID NO: 295 - DNA, 32 bp, Artificial Sequence
  Synthetic probe
agaaagttgctgtttcctctggcctcaagcct

SEQ ID NO: 296 - DNA, 26 bp, Artificial Sequence
  Synthetic probe
gccgttgctgctggcaattcctgtcg

SEQ ID NO: 297 - DNA, 29 bp, Artificial Sequence
  Synthetic probe
aagcaacactgtcactttatctccctaga

SEQ ID NO: 298 - DNA, 29 bp, Artificial Sequence
  Synthetic probe
cagccaccttggttttgtggtttggcaaa

SEQ ID NO: 299 - DNA, 27 bp, Artificial Sequence
  Synthetic probe
aatcacattactgcctctcatgtcaca

SEQ ID NO: 300 - DNA, 32 bp, Artificial Sequence
  Synthetic probe
cctgacaatatcctggctgccataatgccagc

SEQ ID NO: 301 - DNA, 32 bp, Artificial Sequence
  Synthetic probe
tccagatcatctgttccctgaggatttacagt

SEQ ID NO: 302 - DNA, 31 bp, Artificial Sequence
  Synthetic probe
ccctcctgtgagagtctgaaggacactattg

SEQ ID NO: 303 - DNA, 32 bp, Artificial Sequence
  Synthetic probe
ctccaatggtgctctcctggtactcatggaac

SEQ ID NO: 304 - DNA, 34 bp, Artificial Sequence
  Synthetic probe
gccaaattctgcccctggatatgcatgcacaatt

SEQ ID NO: 305 - DNA, 35 bp, Artificial Sequence
  Synthetic probe
tccttgtcatctagaactactttggtgcctccata

SEQ ID NO: 306 - DNA, 34 bp, Artificial Sequence
  Synthetic probe
ctcagccccagctggagaatttttcccctcatta

SEQ ID NO: 307 - DNA, 33 bp, Artificial Sequence
  Synthetic probe
gccaccacctctctttttcacaggacattacca

SEQ ID NO: 308 - DNA, 32 bp, Artificial Sequence
  Synthetic probe
gctgtggtcttgtgatatcagttgtcagcctg

SEQ ID NO: 309 - DNA, 34 bp, Artificial Sequence
  Synthetic probe
gcctccaccaccataggggccagagcttctgcct

SEQ ID NO: 310 - DNA, 31 bp, Artificial Sequence
  Synthetic probe
atagccaccttggttttgtggtttggcaaag

SEQ ID NO: 311 - DNA, 32 bp, Artificial Sequence
  Synthetic probe
gccttcagcctctgggtccagcagttaattct

SEQ ID NO: 312 - DNA, 28 bp, Artificial Sequence
  Synthetic probe
agcatcaaacctccgtgctaaatttaaa

SEQ ID NO: 313 - DNA, 32 bp, Artificial Sequence
  Synthetic probe
agtcaacctatactgtcagcaccaggacccac

SEQ ID NO: 314 - DNA, 28 bp, Artificial Sequence
  Synthetic probe
cctgagccagctcacatcacccctgacc

SEQ ID NO: 315 - DNA, 29 bp, Artificial Sequence
  Synthetic probe
tacatttatagattccctcttcagccata

SEQ ID NO: 316 - DNA, 35 bp, Artificial Sequence
  Synthetic probe
gtcacccagttaaatagcttctgaacctccctgca

SEQ ID NO: 317 - DNA, 22 bp, Artificial Sequence
  Synthetic probe
ttgatccaagctcccacatttg

SEQ ID NO: 318 - DNA, 23 bp, Artificial Sequence
  Synthetic probe
ctgccaccaactctaattgattc

SEQ ID NO: 319 - DNA, 30 bp, Artificial Sequence
  Synthetic probe
agcgctgctgtctccacagttacatacctg

SEQ ID NO: 320 - DNA, 34 bp, Artificial Sequence
  Synthetic probe
ctccccatctgttgctaagccccattagctgtgt

SEQ ID NO: 321 - DNA, 32 bp, Artificial Sequence
  Synthetic probe
tgccgatgtcgtcctaattcaccaggccccga

SEQ ID NO: 322 - DNA, 24 bp, Artificial Sequence
  Synthetic probe
ttaatggaacctgggctctgtgtc

SEQ ID NO: 323 - DNA, 26 bp, Artificial Sequence
  Synthetic probe
gtgctcccaatccagacgatccatta

SEQ ID NO: 324 - DNA, 20 bp, Artificial Sequence
  Synthetic probe
tggtgccagcttcatcgccg

SEQ ID NO: 325 - DNA, 20 bp, Artificial Sequence
  Synthetic probe
cccagctacacctccacgca

SEQ ID NO: 326 - DNA, 28 bp, Artificial Sequence
  Synthetic probe
ctcagtccccacacccccagccagagtc

SEQ ID NO: 327 - DNA, 28 bp, Artificial Sequence
  Synthetic probe
cctgaggctccactcctagaagaattgc

SEQ ID NO: 328 - DNA, 34 bp, Artificial Sequence
  Synthetic probe
ctcccaagggtcaccataaagaggacactataaa

SEQ ID NO: 329 - DNA, 32 bp, Artificial Sequence
  Synthetic probe
ctcgccggctccaaactttccccaactccagg

SEQ ID NO: 330 - DNA, 34 bp, Artificial Sequence
  Synthetic probe
ctgctctttgcctcctataagtggaatgtctccc

SEQ ID NO: 331 - DNA, 33 bp, Artificial Sequence
  Synthetic probe
ctcacttgcctcctgcaaagcaccagtagctgc

SEQ ID NO: 332 - DNA, 32 bp, Artificial Sequence
  Synthetic probe
ctggagccccgaggcaaaactcaccccaggca

SEQ ID NO: 333 - DNA, 33 bp, Artificial Sequence
  Synthetic probe
gagttgccggcggccgccccggccgacagcgcc

SEQ ID NO: 334 - DNA, 32 bp, Artificial Sequence
  Synthetic probe
ggccctgggaatcagagagacagtgcccttcc

SEQ ID NO: 335 - DNA, 32 bp, Artificial Sequence
  Synthetic probe
tcctagaagccatcagtatcccacagagccag

SEQ ID NO: 336 - DNA, 33 bp, Artificial Sequence
  Synthetic probe
actggcccagtccattctgcacctcttgcccta

SEQ ID NO: 337 - DNA, 35 bp, Artificial Sequence
  Synthetic probe
tacaaatcctcagatgtttccacaaaggctccctt

SEQ ID NO: 338 - DNA, 29 bp, Artificial Sequence
  Synthetic probe
gctaaatggccccagactgttctgctgca

SEQ ID NO: 339 - DNA, 29 bp, Artificial Sequence
  Synthetic probe
gccatctgccaccgacactcatactctgt

SEQ ID NO: 340 - DNA, 23 bp, Artificial Sequence
  Synthetic probe
gcacaccgcctccggcaaactgc

SEQ ID NO: 341 - DNA, 33 bp, Artificial Sequence
  Synthetic probe
attctacagcatttttcccatgacctttcctga

SEQ ID NO: 342 - DNA, 31 bp, Artificial Sequence
  Synthetic probe
gtgctttcattcccccaacagaagggcatta

SEQ ID NO: 343 - DNA, 32 bp, Artificial Sequence
  Synthetic probe
aagctctatttatctgggctccccagcttgct

SEQ ID NO: 344 - DNA, 36 bp, Artificial Sequence
  Synthetic probe
gaaagtagaatttggccctccaactgtacaggatga

SEQ ID NO: 345 - DNA, 31 bp, Artificial Sequence
  Synthetic probe
caggcttcacccctcagcccactttgttaac

SEQ ID NO: 346 - DNA, 32 bp, Artificial Sequence; identical to SEQ ID NO: 329
  Synthetic probe

SEQ ID NO: 347 - DNA, 34 bp, Artificial Sequence
  Synthetic probe
accagccagaccccctgtaggtctaacccaaggt

SEQ ID NO: 348 - DNA, 29 bp, Artificial Sequence
  Synthetic probe
ttccccttgttaaaattacagctgcacca

SEQ ID NO: 349 - DNA, 28 bp, Artificial Sequence
  Synthetic probe
ctcctcccatttcctaatttgatttcac

SEQ ID NO: 350 - DNA, 20 bp, Artificial Sequence
  Synthetic probe
gatctgtgccctttgccctt

SEQ ID NO: 351 - DNA, 34 bp, Artificial Sequence
  Synthetic probe
aattctctttacctggcacctttagggcaaagca

SEQ ID NO: 352 - DNA, 25 bp, Artificial Sequence
  Synthetic probe
agggcccccacccgatgtctcccac

SEQ ID NO: 353 - DNA, 30 bp, Artificial Sequence
  Synthetic probe
ccactttcctggcgaccctccgtgcgtggg

SEQ ID NO: 354 - DNA, 31 bp, Artificial Sequence
  Synthetic probe
agcctgtctgtgccctctgcagcagctcacc

SEQ ID NO: 355 - DNA, 30 bp, Artificial Sequence
  Synthetic probe
tatttgagaaaatttactatcccccagcct

SEQ ID NO: 356 - DNA, 19 bp, Artificial Sequence
  Synthetic probe
gccttcacccttcccatcc

SEQ ID NO: 357 - DNA, 22 bp, Artificial Sequence
  Synthetic probe
gctggctccatgctccagtggg

SEQ ID NO: 358 - DNA, 35 bp, Artificial Sequence
  Synthetic probe
gggtcctgactcccacagcctgtcatatcaagcgc

SEQ ID NO: 359 - DNA, 31 bp, Artificial Sequence
  Synthetic probe
attgttacccacaccaacacccactcaacag

SEQ ID NO: 360 - DNA, 32 bp, Artificial Sequence; identical to SEQ ID NO: 264
  Synthetic probe

SEQ ID NO: 361 - DNA, 23 bp, Artificial Sequence
  Synthetic probe
tcatagccctgtacaatgctgct

SEQ ID NO: 362 - DNA, 23 bp, Artificial Sequence
  Synthetic probe
ctacctgcactgtaagcactttt

SEQ ID NO: 363 - DNA, 21 bp, Artificial Sequence
  Synthetic probe
atctgcactgtcagcacttta

SEQ ID NO: 364 - DNA, 23 bp, Artificial Sequence
  Synthetic probe
tgatagccctgtacaatgctgct

SEQ ID NO: 365 - DNA, 24 bp, Artificial Sequence
  Synthetic probe
agggactctgggaaattggacact

SEQ ID NO: 366 - DNA, 22 bp, Artificial Sequence
  Synthetic probe
atgcccttttaacattgcactg

SEQ ID NO: 367 - DNA, 22 bp, Artificial Sequence
  Synthetic probe
atgccctttcatcattgcactg

SEQ ID NO: 368 - DNA, 22 bp, Artificial Sequence
  Synthetic probe
cccctctggtcaaccagtcaca

SEQ ID NO: 369 - DNA, 23 bp, Artificial Sequence
  Synthetic probe
cggcctgattcacaacaccagct

SEQ ID NO: 370 - DNA, 22 bp, Artificial Sequence
  Synthetic probe
cacaaaccattatgtgctgcta

SEQ ID NO: 371 - DNA, 22 bp, Artificial Sequence
  Synthetic probe
tgtaaaccatgatgtgctgcta

SEQ ID NO: 372 - DNA, 23 bp, Artificial Sequence
  Synthetic probe
caaagtgcttacagtgcaggtag

SEQ ID NO: 373 - DNA, 23 bp, Artificial Sequence
  Synthetic probe
actcaccgacagcgttgaatgtt

SEQ ID NO: 374 - DNA, 23 bp, Artificial Sequence
  Synthetic probe
acccaccgacagcaatgaatgtt

SEQ ID NO: 375 - DNA, 23 bp, Artificial Sequence
  Synthetic probe
cagctgcttttgggattccgttg

SEQ ID NO: 376 - DNA, 21 bp, Artificial Sequence
  Synthetic probe
gccaatatttctgtgctgcta

SEQ ID NO: 377 - DNA, 22 bp, Artificial Sequence
  Synthetic probe
cccaacaacaggaaactaccta

SEQ ID NO: 378 - DNA, 23 bp, Artificial Sequence
  Synthetic probe
tcagttttgcatagatttgcaca

SEQ ID NO: 379 - DNA, 23 bp, Artificial Sequence
  Synthetic probe
ctacctgcactataagcacttta

SEQ ID NO: 380 - DNA, 23 bp, Artificial Sequence
  Synthetic probe
ctacctgcactatgagcactttg

SEQ ID NO: 381 - DNA, 22 bp, Artificial Sequence
  Synthetic probe
acagttcttcaactggcagctt

SEQ ID NO: 382 - DNA, 23 bp, Artificial Sequence
  Synthetic probe
gaaacccagcagacaatgtagct

SEQ ID NO: 383 - DNA, 21 bp, Artificial Sequence
  Synthetic probe
acccagtagccagatgtagct

SEQ ID NO: 384 - DNA, 22 bp, Artificial Sequence
  Synthetic probe
tcagaccgagacaagtgcaatg

SEQ ID NO: 385 - DNA, 22 bp, Artificial Sequence
  Synthetic probe
gaacaccaggagaaatcggtca

SEQ ID NO: 386 - DNA, 22 bp, Artificial Sequence
  Synthetic probe
acatttgtaggagctgaccttc

SEQ ID NO: 387 - DNA, 21 bp, Artificial Sequence
  Synthetic probe
agctatgccagcatcttgcct

SEQ ID NO: 388 - DNA, 22 bp, Artificial Sequence
  Synthetic probe
ttttcgacccaactctcccgct

SEQ ID NO: 389 - DNA, 23 bp, Artificial Sequence
  Synthetic probe
acatttttcgttattgctcttga

SEQ ID NO: 390 - DNA, 23 bp, Artificial Sequence
  Synthetic probe
agagtgtgtctttagcgtgggca

SEQ ID NO: 391 - DNA, 22 bp, Artificial Sequence
  Synthetic probe
accaggttccaccccagcaggc

SEQ ID NO: 392 - DNA, 22 bp, Artificial Sequence
  Synthetic probe
tcagtttcctctgcaaacagtt

SEQ ID NO: 393 - DNA, 22 bp, Artificial Sequence
  Synthetic probe
gaggtttcccgtgtatgtttca

SEQ ID NO: 394 - DNA, 18 bp, Artificial Sequence
  Synthetic probe
aagtgtccctccacagta

SEQ ID NO: 395 - DNA, 23 bp, Artificial Sequence
  Synthetic probe
acaacaaaatcactagtcttcca

SEQ ID NO: 396 - DNA, 22 bp, Artificial Sequence
  Synthetic probe
ataacgtgaacagggccggaca

SEQ ID NO: 397 - DNA, 22 bp, Artificial Sequence
  Synthetic probe
cacaagatcggatctacgggtt

SEQ ID NO: 398 - DNA, 75 bp, Homo sapiens
  misc_feature (1)..(75): Pre-microRNA sequence
gttgctatttccctcagttgagggcgaagttagcaaatccgtagctgcaagtctcaacttgggggagggggcgac

SEQ ID NO: 399 - DNA, 97 bp, Homo sapiens
  misc_feature (1)..(97): Pre-microRNA sequence
gtgaggagcaggttagctgggtgaaaagttcacagtgaggggagctgtctgttccctcgcttaatttatccactatttggctaaccttgctctgaac

SEQ ID NO: 400 - DNA, 98 bp, Homo sapiens
  misc_feature (1)..(98): Pre-microRNA sequence
aaataagccattccaaaccattctctgatttgctgtgagtggcagaatcattcaccgtggtgaatcatagcagggagaaccatttggaatgattattt

SEQ ID NO: 401 - DNA, 87 bp, Homo sapiens
  misc_feature (1)..(87): Pre-microRNA sequence
ggcggcggcggcggcggctccggggatggcggcggctccgctgctgctgctgctgctgctcgtgcccgtgccgctgctgccgctgct

SEQ ID NO: 402 - DNA, 94 bp, Homo sapiens
  misc_feature (1)..(94): Pre-microRNA sequence
ctcaagtgtggggagtcatggggtgtggaggggaggaaaggaaaggtattttgtttctttgtctatacatttcctagatttctatgcagttggg

SEQ ID NO: 403 - DNA, 79 bp, Homo sapiens
  misc_feature (1)..(79): Pre-microRNA sequence
tgtgagtgggtttggggtgaggctatggggagggcggggtgccgccttgcccagcccctgagggccccagcccagtaca

SEQ ID NO: 404 - DNA, 88 bp, Homo sapiens
  misc_feature (1)..(88): Pre-microRNA sequence
gaatttgccctacggtgtgaccccagcctctccctctggccacagccagggccggcggggggcctctgggagcatcttcagcaagttc

SEQ ID NO: 405 - DNA, 73 bp, Homo sapiens
  misc_feature (1)..(73): Pre-microRNA sequence
gtgcataagggaagaagacaagaaaatgatattgtcgtttaatagttcactttagatcttcatctcttatcac

SEQ ID NO: 406 - DNA, 72 bp, Homo sapiens
  misc_feature (1)..(72): Pre-microRNA sequence
ggctcggtttcaaatctctcctaatccactaatgaacctttattaaagtgggagagagaggttgaatcagtc

SEQ ID NO: 407 - DNA, 78 bp, Homo sapiens
  misc_feature (1)..(78): Pre-microRNA sequence
cggagccgcccgcgccagcctctccatctcgcaagttttaattaacgctgagggggaggcggctgacgggcgggtcgg

SEQ ID NO: 408 - DNA, 77 bp, Homo sapiens
  misc_feature (1)..(77): Pre-microRNA sequence
ggctctgcaccaggcgtttcttcttgtgtttcctcttctcttctggagagggatgaaggagatcctttgtgagaggc

SEQ ID NO: 409 - DNA, 76 bp, Homo sapiens
  misc_feature (1)..(76): Pre-microRNA sequence
gctcctgctccgccgcgggagctgctccggcggccgcagggctcgctcgggaagctgaggcggcggaggctggagt

SEQ ID NO: 410 - DNA, 78 bp, Homo sapiens
  misc_feature (1)..(78): Pre-microRNA sequence
tggcctgacgtgaggaggagggacttttcgaagttttataggaaagtttccgctttccagtccccctcccccgtccca

SEQ ID NO: 411 - DNA, 74 bp, Homo sapiens
  misc_feature (1)..(74): Pre-microRNA sequence
ggctctgggaaagccttcctttcccggctggcctggcattcaaagccagacaaaggggggctttctctctcgcc

SEQ ID NO: 412 - DNA, 82 bp, Homo sapiens
  misc_feature (1)..(82): Pre-microRNA sequence
gcccatttccctaatggcagccgattgccatttgctattcaaatcagactagataaattacagtacatgccagggaacaggc

SEQ ID NO: 413 - DNA, 82 bp, Homo sapiens
  misc_feature (1)..(82): Pre-microRNA sequence
tcagcgtcaggaacttcatcctggcagccgacctcatgaagagcatctggctgctgttaccaggaggagagcaagacgctga

SEQ ID NO: 414 - DNA, 83 bp, Homo sapiens
  misc_feature (1)..(83): Pre-microRNA sequence
agcaattccaactgccccatttatattcctaagtagaggacttgttaatatggagcctgcctctggggaagtgggaatgtgct

SEQ ID NO: 415 - DNA, 84 bp, Homo sapiens
  misc_feature (1)..(84): Pre-microRNA sequence
gtcatagatggcctcattgtctaccatgaagcacaatcagagtgctctagggtggtgtgagtggtgaggatgaagttgtagggc

SEQ ID NO: 416 - DNA, 80 bp, Homo sapiens
  misc_feature (1)..(80): Pre-microRNA sequence
ggctggccaggctccgcccccggccctccctgcgcccggccggtgcgcagggaggtcggaggagcgggcactgcccaccc

SEQ ID NO: 417 - DNA, 90 bp, Homo sapiens
  misc_feature (1)..(90): Pre-microRNA sequence
gctccccggctccctcactgcggcagccgcggccccataaatcgtgagagcgacgtgctccggagccgagaatggagagggccggggagc

SEQ ID NO: 418 - DNA, 78 bp, Homo sapiens
  misc_feature (1)..(78): Pre-microRNA sequence
tgctggaggtaagggttttctgaagcctggtgccatggccacatgtgcacatgagggagggagacgctgaggctagca

SEQ ID NO: 419 - DNA, 84 bp, Homo sapiens
  misc_feature (1)..(84): Pre-microRNA sequence
gtgatgtgatttctgcccagtgctctgaatgtcaaactgaagaaattcagtgaaatgcgggtaaacggcgggagtaactatgac

SEQ ID NO: 420 - DNA, 73 bp, Homo sapiens
  misc_feature (1)..(73): Pre-microRNA sequence
tttcctctctcctttctcctcaagctgattagcgggtcgggcaatggcgtgaggagatgctgggggtaggaaa

SEQ ID NO: 421 - DNA, 77 bp, Homo sapiens
  misc_feature (1)..(77): Pre-microRNA sequence
cccaagctccttcctggaggacttaacactgtgttgagcagttgttttgaatttccgggcagggggctgcaaaaggg

SEQ ID NO: 422 - DNA, 85 bp, Homo sapiens
  misc_feature (1)..(85): Pre-microRNA sequence
caatcaattagcacatgagtaataccaagcccattaggacaaactgatgccgggggagttatgtcatctgctatagaaatgattg

SEQ ID NO: 423 - DNA, 77 bp, Homo sapiens
  misc_feature (1)..(77): Pre-microRNA sequence
gccggctccaacccagaggcccggaataggcgcggagttataaatagtgccacccgcaggtgttggggggagtcggc

SEQ ID NO: 424 - DNA, 72 bp, Homo sapiens
  misc_feature (1)..(72): Pre-microRNA sequence
cccagaattctagtaatgagggagacaggttatgccaagcctgcttctcccaggatgcactgggagcctggg

SEQ ID NO: 425 - DNA, 85 bp, Homo sapiens
  misc_feature (1)..(85): Pre-microRNA sequence
ggtgtgtctgcctctctttctgcccccctataccccttgaccccagggggaaggcactcgggcagcacaaagggagcagatgccc

SEQ ID NO: 426 - DNA, 75 bp, Homo sapiens
  misc_feature (1)..(75): Pre-microRNA sequence
gggtccgggtctctaccgcgccctcatgcaggaggcccttggagcaggagggggaagcgggagacccggcagccc

SEQ ID NO: 427 - DNA, 81 bp, Homo sapiens
  misc_feature (1)..(81): Pre-microRNA sequence
tgtgaagccacaggaaggggctctgtgacatcacaggtaggggcagtgtgaagtcacaggaaggggctgtgggaagtcaca

SEQ ID NO: 428 - DNA, 73 bp, Homo sapiens
  misc_feature (1)..(73): Pre-microRNA sequence
ctttttctctctgctgggaaaccttgcttgacttcatgtccagtgtttggtatccaaagacggggaggaggag

SEQ ID NO: 429 - DNA, 85 bp, Homo sapiens
  misc_feature (1)..(85): Pre-microRNA sequence
ggagccagcagagggagctgtcgtcccagaactttcttagagctgctaagaaattctgattttgaaaaagatcttcctaggctcc

SEQ ID NO: 430 - DNA, 73 bp, Homo sapiens
  misc_feature (1)..(73): Pre-microRNA sequence
ggcgtttcttcttgtgtttcctcttctccttttctggagagggatgaaggagaccctttgcaagaggcatgtt

SEQ ID NO: 431 - DNA, 80 bp, Homo sapiens
  misc_feature (1)..(80): Pre-microRNA sequence
gtctttgctgatatagaggaaggaaggggaaaaatgagcgcattagttctcttttattaaaagagttatttcagcatgac

SEQ ID NO: 432 - DNA, 79 bp, Homo sapiens
  misc_feature (1)..(79): Pre-microRNA sequence
tggaaggagagcagcggcatttggtttggtggtgggcagattttcttttacgactgctaaatgcctgcctttctcccca

SEQ ID NO: 433 - DNA, 80 bp, Homo sapiens
  misc_feature (1)..(80): Pre-microRNA sequence
agagggtgtgctctggggagggcccacccaagacagacctcatggccttcagtcccagccttcctcagggtccatcctct

SEQ ID NO: 434 - DNA, 74 bp, Homo sapiens
  misc_feature (1)..(74): Pre-microRNA sequence
ccccaccaaccaccagtgctcaggacttctgcaaatcccattcggatctgggagcagctgatgagggggtgggg

SEQ ID NO: 435 - DNA, 69 bp, Homo sapiens
  misc_feature (1)..(69): Pre-microRNA sequence
ggctttgcccttttcggtgacacaggctgttgctattccaagcagcctatcacaggcagggggagggcc

SEQ ID NO: 436 - DNA, 86 bp, Homo sapiens
  misc_feature (1)..(86): Pre-microRNA sequence
tctcgagaggggcaggcacggtgttccatggcaagacggcggttgatgtataggcgtggcatgaagctgggcttgctgctctcaga

SEQ ID NO: 437 - DNA, 84 bp, Homo sapiens
  misc_feature (1)..(84): Pre-microRNA sequence
caagggcacagtgagaagatattttattacccgtgtatttatttatgggttttgggggttttaaaactggcaattaaaaccttg

SEQ ID NO: 438 - DNA, 75 bp, Homo sapiens
  misc_feature (1)..(75): Pre-microRNA sequence
gggggaaggggctggaatcatcgtgggttggaacagttaaaggaacctctgttcagccccagccccaaggctccc

SEQ ID NO: 439 - DNA, 75 bp, Homo sapiens
  misc_feature (1)..(75): Pre-microRNA sequence
ctctctaccaccaaaataaattcaattactaactttgagtaattgcgggtaatttatttcttggagggcagagag

SEQ ID NO: 440 - DNA, 89 bp, Homo sapiens
  misc_feature (1)..(89): Pre-microRNA sequence
gccatgggcctccatagtttcctgtagcccccttggttcccaagaatagttttggaatggggcgtgctgtgataatgggggttaatggt

SEQ ID NO: 441 - DNA, 85 bp, Homo sapiens
  misc_feature (1)..(85): Pre-microRNA sequence
gccctccctcccaccgcacttacacctgaacttgtctccagcactgcggacacccgggtgacacattctttcggagagggagggc

SEQ ID NO: 442 - DNA, 84 bp, Homo sapiens
  misc_feature (1)..(84): Pre-microRNA sequence
tgccatctgctctgaagcctcccaagctgggcctcccctcccacttctggagcccaggaacagatgtgggaggctgagcaggca

SEQ ID NO: 443 - DNA, 80 bp, Homo sapiens
  misc_feature (1)..(80): Pre-microRNA sequence
cgactttatcacccatcggttatctgtgtcgcctgaaggaactccgggtaaggtacaggaaaaaggtgggggtattgttg

SEQ ID NO: 444 - DNA, 80 bp, Homo sapiens
  misc_feature (1)..(80): Pre-microRNA sequence
tttctgtatatgtttctggagtcctgagcctgagctaaacaaaagcaggaggctgacggggctgctggagtttgcagaga

SEQ ID NO: 445 - DNA, 83 bp, Homo sapiens
  misc_feature (1)..(83): Pre-microRNA sequence
gcaggatccctcttttcatctgaaaattaccactaatttgcaattagttggaggaaaattggagatggaggaaagggaattgc

SEQ ID NO: 446 - DNA, 82 bp, Homo sapiens
  misc_feature (1)..(82): Pre-microRNA sequence
gccatttggtacctgatgtgatcgggctttttcctgtcgtgtgaaaaaacggggcaggattaaaacataagggaaaggtggt

SEQ ID NO: 447 - DNA, 83 bp, Homo sapiens
  misc_feature (1)..(83): Pre-microRNA sequence
gattcatctattctttttctccttcttcaaagataactctgtaagcacttaaggaggggaaagtcattaagaaaagtggaatc

SEQ ID NO: 448 - DNA, 83 bp, Homo sapiens
  misc_feature (1)..(83): Pre-microRNA sequence
gtgctgggtgggtggttttttatcttcacggatttatggagtccttaaaacatctgttccgttctgattcccccgctcagtac

SEQ ID NO: 449 - DNA, 77 bp, Homo sapiens
  misc_feature (1)..(77): Pre-microRNA sequence
ggaaatgggagaaggataaagtggaaatctaattttgagaaataaggattaaaggttccattattcatgctgttttc

SEQ ID NO: 450 - DNA, 74 bp, Homo sapiens
  misc_feature (1)..(74): Pre-microRNA sequence
tctgtttttatcagtttaatatatgatacatcttctatccaaggacaatatattaaatggatttttggagcaga

SEQ ID NO: 451 - DNA, 74 bp, Homo sapiens
  misc_feature (1)..(74): Pre-microRNA sequence
agcagccaggtgagccccgaaaggtggggcggggcaggggcgctcccagccccaccccgggatctggtgacgct

SEQ ID NO: 452 - DNA, 86 bp, Homo sapiens
  misc_feature (1)..(86): Pre-microRNA sequence
gttccagaaggcggcgcgtgcggttgggaacgcggagcggacggattcgattcaacggggttccggaccgcgctgcgctatggagc

SEQ ID NO: 453 - DNA, 80 bp, Homo sapiens
  misc_feature (1)..(80): Pre-microRNA sequence
gtgggctgcatgttcccgcattgctggtgagggtgcacgatctggcactgcagctggctggtgggagggctgcatcctac

SEQ ID NO: 454 - DNA, 78 bp, Homo sapiens
  misc_feature (1)..(78): Pre-microRNA sequence
actgcttagcactcctccacttgcgaatgcacttaagacagtaggtgtggttgcagttggagaggatcccgaagcggt

SEQ ID NO: 455 - DNA, 110 bp, Homo sapiens
  misc_feature (1)..(110): Pre-microRNA sequence
tccttcccccttcgtggcttgcggtctctcttccccgcctcggcccccaggaagtgtgagtgctgggggtggtgaggttaggagggggaagcgtcatatgggggatgggg

SEQ ID NO: 456 - DNA, 71 bp, Homo sapiens
  misc_feature (1)..(71): Pre-microRNA sequence
ctccctcaggccccgcctgcacctttcccagcccccaggactctaggggaagtggtgggtgggggaggggg

SEQ ID NO: 457 - DNA, 84 bp, Homo sapiens
  misc_feature (1)..(84): Pre-microRNA sequence
gcttggtgagaggaggaggaggcagggccgaccgccacccgcctgtctgccatctggtccccttcccctccctcctctcattgc

SEQ ID NO: 458 - DNA, 87 bp, Homo sapiens
  misc_feature (1)..(87): Pre-microRNA sequence
cagagtctaaatggaagagtcctccgtatttacccagctcatctcctgtgtaatggatttggaggagagatttccactggggctctg

SEQ ID NO: 459 - DNA, 79 bp, Homo sapiens
  misc_feature (1)..(79): Pre-microRNA sequence
acactctcctcttgtctccttgtaatcaattcattgtcatcagaaatgtgtgacacctcgaggggaggggaggacgtgt

SEQ ID NO: 460 - DNA, 81 bp, Homo sapiens
  misc_feature (1)..(81): Pre-microRNA sequence
tgtgctctcattgttattccaaaagtctctgtctagatcactggaggggcagagagagaggggagaaaacagggagataca

SEQ ID NO: 461 - DNA, 78 bp, Homo sapiens
  misc_feature (1)..(78): Pre-microRNA sequence
gttctagttccaggatgctgatactttaagcccgaggctctaacttgagcaggaagagtttattttgggatgaagaat

SEQ ID NO: 462 - DNA, 87 bp, Homo sapiens
  misc_feature (1)..(87): Pre-microRNA sequence
ccctcccagttcccatagcaactgggctgtagcagccagaacttgattgagcccagcagtggcccgactgaggtggggaaaggaggg

SEQ ID NO: 463 - DNA, 106 bp, Homo sapiens
  misc_feature (1)..(106): Pre-microRNA sequence
gggccagcgaggaggcacttgccgaaaccacacacttccttacattccatagcaaagtaatccatatggggatataaagaagcatgtggcctcgggaagcagtgtc

SEQ ID NO: 464 - DNA, 74 bp, Homo sapiens
  misc_feature (1)..(74): Pre-microRNA sequence
gccacctttcatggtgaggatgcctgccaccttcaggatcacatctttgggtgaggtccaaccagagagggagc

SEQ ID NO: 465 - DNA, 82 bp, Homo sapiens
  misc_feature (1)..(82): Pre-microRNA sequence
aggggtgggggtggcagggcccagcgggctggcaggcaaaccctggttttggcccagggacctataatcagctcctgcccct

SEQ ID NO: 466 - DNA, 74 bp, Homo sapiens
  misc_feature (1)..(74): Pre-microRNA sequence
ggcttgcagaatgtggatgtcttcgcgggggaggtggccacgttctcctgtgaggtgtctcacgcgggtgggcc

SEQ ID NO: 467 - DNA, 73 bp, Homo sapiens
  misc_feature (1)..(73): Pre-microRNA sequence
ccaggagagctggctggttggggagaagacactaaccctgtgagtctgacctcagccagctaacctgccctgg

SEQ ID NO: 468 - DNA, 73 bp, Homo sapiens
  misc_feature (1)..(73): Pre-microRNA sequence
tgtcatttgtccattttctcttctgacccagtggtattctgcaagatcagaggggagagaaggattaatgtca

SEQ ID NO: 469 - DNA, 84 bp, Homo sapiens
  misc_feature (1)..(84): Pre-microRNA sequence
ccccactcccttgcaggctgcaggcactagggctctcaggaattgcagggactttggtgcccaagcaaatgcttgggcaggggg

SEQ ID NO: 470 - DNA, 77 bp, Homo sapiens
  misc_feature (1)..(77): Pre-microRNA sequence
tcgttcccggatctggtgggtgaggttttcgatcagggcaaatacctgatcacagaccttcacaggattctggatga

SEQ ID NO: 471 - DNA, 86 bp, Homo sapiens
  misc_feature (1)..(86): Pre-microRNA sequence
tcatggcagcgacccacctccagtcccctggacaatcgggtacaagagacttaaggttgggcatgggaagggtggggtttccatga

SEQ ID NO: 472 - DNA, 92 bp, Homo sapiens
  misc_feature (1)..(92): Pre-microRNA sequence
caaggtctttggtcttggaggaaggtgtgctactggaagaggccaccgaggcagggctggtgggggcatcttttttcaggctacgggccttg

SEQ ID NO: 473 - DNA, 84 bp, Homo sapiens
  misc_feature (1)..(84): Pre-microRNA sequence
caggggcgcgggccggagagcgggtgtgcaaagtgggcgcagggccctggggccgcgccccttgctctgccggctcgactcttg

SEQ ID NO: 474 - DNA, 84 bp, Homo sapiens
  misc_feature (1)..(84): Pre-microRNA sequence
gggggcaggggaaggtgacggaaacggctagttacccagaattctctgggggaaccagaaaaatcggttatctagaattctccc

SEQ ID NO: 475 - DNA, 90 bp, Homo sapiens
  misc_feature (1)..(90): Pre-microRNA sequence
tgtagcaaatcccatccatctgtttggctgctcttgcctcagtgacagtgccaagagcccaggcagacttagagggggaagtgctttgca

SEQ ID NO: 476 - DNA, 90 bp, Homo sapiens
  misc_feature (1)..(90): Pre-microRNA sequence
gcaattagaatgcagggaggttcagaagctatttaactgggtgacccctgaggtcgctgcatctgactcccatccctggataaatattgt

SEQ ID NO: 477 - DNA, 90 bp, Homo sapiens
  misc_feature (1)..(90): Pre-microRNA sequence
gcctctgtgcgcatggatataatcagctttgataggcagaggctgaggctgtttttccaattagagctgttagaggattctggcaggggc

SEQ ID NO: 478 - DNA, 85 bp, Homo sapiens
  misc_feature (1)..(85): Pre-microRNA sequence
gggggcgaggctatgtcgcggtggcagcccggatgggccggcagggccgggagtaacgggacgtcgccgcggagcttcttccccc

SEQ ID NO: 479 - DNA, 79 bp, Homo sapiens
  misc_feature (1)..(79): Pre-microRNA sequence
cggtccccagagggggcagctctaaccctaaacaagtgctcaacccttgaatgggcctggatggctcccctggggactg

SEQ ID NO: 480 - DNA, 73 bp, Homo sapiens
  misc_feature (1)..(73): Pre-microRNA sequence
ggcatttcttcttgtgtttcctcttctcctcttctggggagggatgaaggagatcctttgcgagaggcatgtt

SEQ ID NO: 481 - DNA, 87 bp, Homo sapiens
  misc_feature (1)..(87): Pre-microRNA sequence
gagtgtgaactggctccagctgtgacaataaaacagcaggtggctgctgtcattaggggtggcagatgaggcaggggactaacattc

SEQ ID NO: 482 - DNA, 70 bp, Homo sapiens
  misc_feature (1)..(70): Pre-microRNA sequence
tgaagaatttcttctggatgactgaccaagaggctattcaagatctctggcagtggaggaagtctcttta

SEQ ID NO: 483 - DNA, 79 bp, Homo sapiens
  misc_feature (1)..(79): Pre-microRNA sequence
aaatcaagcacagcaggaggtgttcgtctcccaggtaatgggtaaatgatgagcagatgagccatccttctattgattt

SEQ ID NO: 484 - DNA, 74 bp, Homo sapiens
  misc_feature (1)..(74): Pre-microRNA sequence
ggcctgtcttgggggtagctttgtggcctgaaaacaaatcatccttcacagcttgctcccaagtccaataagcc

SEQ ID NO: 485 - DNA, 76 bp, Homo sapiens
  misc_feature (1)..(76): Pre-microRNA sequence
cttaggggtgggggagccctgttagccctgtaaataaagtttaacgaggtgaacaatggctggctctgtccctgag

SEQ ID NO: 486 - DNA, 81 bp, Homo sapiens
  misc_feature (1)..(81): Pre-microRNA sequence
atcacctttccccctcccatgtgctttccttcatttgagatcttttgacctttggctttatttgggagggggaagggtgat

SEQ ID NO: 487 - DNA, 81 bp, Homo sapiens
  misc_feature (1)..(81): Pre-microRNA sequence
gaggggctgtagctcagggtgtgcactgcgaggctggacctgttgagtctgcagtggacatccatttagcttcaggttgtc

SEQ ID NO: 488 - DNA, 74 bp, Homo sapiens
  misc_feature (1)..(74): Pre-microRNA sequence
gagctttatcgctcgggccaggcggaggccgggcggccccgtggcttccggaggcgcccgggcgggatgagctc

SEQ ID NO: 489 - DNA, 82 bp, Homo sapiens
  misc_feature (1)..(82): Pre-microRNA sequence
ggggcggggaggaattccggttctctgggactttccaaaaaaggcgaagatccggtgccggcggctccgcctccctagccct

SEQ ID NO: 490 - DNA, 86 bp, Homo sapiens
  misc_feature (1)..(86): Pre-microRNA sequence
catttcacatccatgaagtaggaattggggctctgcaccaggcgtttcttcttgtgtttcctcttctcctcttctggagagggatg

SEQ ID NO: 491 - DNA, 88 bp, Homo sapiens
  misc_feature (1)..(88): Pre-microRNA sequence
tgctatctcgcctcacacatcaacacacgtgccagacagattctgactgcaaagtctgttattggtgatgagagaggcagagagggca

SEQ ID NO: 492 - DNA, 79 bp, Homo sapiens
  misc_feature (1)..(79): Pre-microRNA sequence
ggggctgccatcctgctgtccgtcatctgtgtggtgctggtcacggccttcaatgactggagcaaggagaagcagttcc

SEQ ID NO: 493 - DNA, 75 bp, Homo sapiens
  misc_feature (1)..(75): Pre-microRNA sequence
agaggggtgactgcggggcttgttgcgctgaagatttacaatgtacttcttgcaggcggctcagcaaccccctct

SEQ ID NO: 494 - DNA, 77 bp, Homo sapiens
  misc_feature (1)..(77): Pre-microRNA sequence
ccaattctcacttaggtgttagggatttaatgatactcctctgaagagtatttttactacctgagggtggggaatgg

SEQ ID NO: 495 - DNA, 86 bp, Homo sapiens
  misc_feature (1)..(86): Pre-microRNA sequence
catgtggggaggtaaataatcatttctgttatgtcagtggaaaattttctggagatcataaagaaatcagtttaccctgaagcatg

SEQ ID NO: 496 - DNA, 78 bp, Homo sapiens
  misc_feature (1)..(78): Pre-microRNA sequence
cggagccgcccgcgccagcctctccatctcgcaagttttaattaacgctgagggagaggcggctgacgggcgggtcgg

SEQ ID NO: 497 - DNA, 89 bp, Homo sapiens
  misc_feature (1)..(89): Pre-microRNA sequence
acagacatccagtctaattacaggtgtctttttaaccagtgagaggaaactgggggaagatagattcttgtttttaatctgctatctgt

SEQ ID NO: 498 - DNA, 71 bp, Homo sapiens
  misc_feature (1)..(71): Pre-microRNA sequence
ccagccctcagctgcagctggggaggggctgaagggtagggagccctatcccacctgcatcagaggcctgg

SEQ ID NO: 499 - DNA, 73 bp, Homo sapiens
  misc_feature (1)..(73): Pre-microRNA sequence
gtcaggctgctgtattctcttacacagatgccagtaagaacaaaggcatcacgtggggagaggataccctgat

SEQ ID NO: 500 - DNA, 80 bp, Homo sapiens
  misc_feature (1)..(80): Pre-microRNA sequence
ggggccagggatagtcggagatgggcagggcgggggccccactggcgaggggccctcggcttctggggtccctgagcccc

SEQ ID NO: 501 - DNA, 75 bp, Homo sapiens
  misc_feature (1)..(75): Pre-microRNA sequence
cggtggagggaaaggggaaaggagccattttctgctgcacatcagtcagtgcctgcgccctccctccctccgccg

SEQ ID NO: 502 - DNA, 73 bp, Homo sapiens
  misc_feature (1)..(73): Pre-microRNA sequence
agggggtgggaggtctgtttggcaactggggtgaagggattgcccttcccctgctgggattcccccagcccct

SEQ ID NO: 503 - DNA, 89 bp, Homo sapiens
  misc_feature (1)..(89): Pre-microRNA sequence
ccgggcgcccccgagagccggccctcccttcctccgtgacaggtgggcctggagttggggaaagtttggagccggcgaggggcgccggg

SEQ ID NO: 504 - DNA, 85 bp, Homo sapiens
  misc_feature (1)..(85): Pre-microRNA sequence
ggcccagaagatgaaaagctgaagtcctttcccttccagctgaagccaggtgtgatgctggcagggagaggttccaagcttggcc

SEQ ID NO: 505 - DNA, 78 bp, Homo sapiens
  misc_feature (1)..(78): Pre-microRNA sequence
gtcaaaactggttttccctgccctaacccaggcgcctttgttaagggcctggcaggatggggcatgaatgagggtgac

SEQ ID NO: 506 - DNA, 73 bp, Homo sapiens
  misc_feature (1)..(73): Pre-microRNA sequence
ccgattatggctttcttctcctgccctttcagtagtgatttgcagaaacaggctgggagaaaggggtctttgg

SEQ ID NO: 507 - DNA, 89 bp, Homo sapiens
  misc_feature (1)..(89): Pre-microRNA sequence
ggcgctgtcggccggggcggccgccggcaactcgtccgtcttgataaccatggtggcgggagcgggcgtccgcctcggctgtccgcgcc

SEQ ID NO: 508 - DNA, 68 bp, Homo sapiens
  misc_feature (1)..(68): Pre-microRNA sequence
gatggtgtggggagcttgggtgtttgtttcccatttcacaaaacaaagcagccaaccttacattcatc

SEQ ID NO: 509 - DNA, 87 bp, Homo sapiens
  misc_feature (1)..(87): Pre-microRNA sequence
ggaagggcactgtctctctgattcccagggcctgtcatttcccgagggctggtggagcccggggattggagggcaagaagcccagcc

SEQ ID NO: 510 - DNA, 86 bp, Homo sapiens
  misc_feature (1)..(86): Pre-microRNA sequence
gtctgcctctttctctgcagtaattgcttcctgacatttgtttattttaattaggagagcagtcttgatcaagagggagggcagac

SEQ ID NO: 511 - DNA, 71 bp, Homo sapiens
  misc_feature (1)..(71): Pre-microRNA sequence
aggaagggaatggactgggagggtttcttttcctgatggaaagcctatttttcttattgtgttccttttct

SEQ ID NO: 512 - DNA, 90 bp, Homo sapiens
  misc_feature (1)..(90): Pre-microRNA sequence
tccactgttggctttagtcacggcggggatcgtcagtttagcgcggccatcgctaaaggagatctgcacgccgggcagagtggaagtgga

SEQ ID NO: 513 - DNA, 74 bp, Homo sapiens
  misc_feature (1)..(74): Pre-microRNA sequence
agcctaaatacattagcgagctggtaaagcttttaaggccttcttgggagcgagtggctggctaatgagaggtt

SEQ ID NO: 514 - DNA, 74 bp, Homo sapiens
  misc_feature (1)..(74): Pre-microRNA sequence
tgcatgtgtgggctggggagggctctgaatatctcctggaacggtacccagagccctgtggctctgcgcatgcg

SEQ ID NO: 515 - DNA, 72 bp, Homo sapiens
  misc_feature (1)..(72): Pre-microRNA sequence
tctttgttaaaatgtaaaatgcatattgggcaaatgctccagggcaatttgcataaaaagtgatgacaaaga

SEQ ID NO: 516 - DNA, 85 bp, Homo sapiens
  misc_feature (1)..(85): Pre-microRNA sequence
ggacactctgaaccccaagtggaattccaactgccagttcttcatccgagacctggagcaggaagtcctctgcatcactgtgttc

SEQ ID NO: 517 - DNA, 75 bp, Homo sapiens
  misc_feature (1)..(75): Pre-microRNA sequence
tctccatcctctgtctcccttgatcctctgttctccctgatggctttgagatgaaggcgacggcaaggatggagg

SEQ ID NO: 518 - DNA, 76 bp, Homo sapiens
  misc_feature (1)..(76): Pre-microRNA sequence
tagctgcctcagagtagaaaataaaactcaacaagattttatcttgtttttaatttctatgtctccctggcagctg

SEQ ID NO: 519 - DNA, 87 bp, Homo sapiens
  misc_feature (1)..(87): Pre-microRNA sequence
ggtgtttggatggatgaggatggtggatgatggatgagggagacggaggattcccttattaaagcatcaaattcttccctaaatatc

SEQ ID NO: 520 - DNA, 80 bp, Homo sapiens
  misc_feature (1)..(80): Pre-microRNA sequence
ggcgcccgccgggctgtccggagcggccgatggggcccgtgtgagcgcgcccaggcccggcccggtgcccggcgggcggc

SEQ ID NO: 521 - DNA, 84 bp, Homo sapiens
  misc_feature (1)..(84): Pre-microRNA sequence
ttccagctatttagtaactcttccaaaacactgtcagcacccatgctaggatgcagggagtgggaaggaagtctaagtagggaa

SEQ ID NO: 522 - DNA, 85 bp, Homo sapiens
  misc_feature (1)..(85): Pre-microRNA sequence
gtcctttaagacagtggttctaaaaatgtgagccgaggatcttttggcttgcagcattaatctccacagtatgtactttaagggc

SEQ ID NO: 523 - DNA, 84 bp, Homo sapiens
  misc_feature (1)..(84): Pre-microRNA sequence
gcaaggggccaagagggagatgcggatgaaatggatgatttaatgggtcatctctcctgtagttaatttctctagatctcttgt

SEQ ID NO: 524 - DNA, 75 bp, Homo sapiens
  misc_feature (1)..(75): Pre-microRNA sequence
aggggtggggaagtctggtgagggacagccttgagtcaaaggatggtcaccgctccatgtggctgccccacccct

SEQ ID NO: 525 - DNA, 87 bp, Homo sapiens
  misc_feature (1)..(87): Pre-microRNA sequence
gcttgtcctaaaagatcttccttctgtttccctgggtttatccacttggttggcctgatgggagcaggaggcggtgagggggcgggc

SEQ ID NO: 526 - DNA, 88 bp, Homo sapiens
  misc_feature (1)..(88): Pre-microRNA sequence
ctggcccattttcattctgcataaaattttaatggtctctctggctgatccgggacggcagcgcgcggagaggctcttaaagggccag

SEQ ID NO: 527 - DNA, 80 bp, Homo sapiens
  misc_feature (1)..(80): Pre-microRNA sequence
cttgtatttgttgacatcctgatttataaaaacctgaacaagttcagtttcaataattctttttgttcaaggaacacaag

SEQ ID NO: 528 - DNA, 89 bp, Homo sapiens; identical to SEQ ID NO: 503
  misc_feature (1)..(89): Pre-microRNA sequence

SEQ ID NO: 529 - DNA, 78 bp, Homo sapiens
  misc_feature (1)..(78): Pre-microRNA sequence
ggatgcaaccgtggaagccggtgccgttgaggatctgccacaggcggaaggcagctgagttgacatccacgggcatcc

SEQ ID NO: 530 - DNA, 87 bp, Homo sapiens
  misc_feature (1)..(87): Pre-microRNA sequence
actttttctggtgggaggggagagcggagcaggctcacgtgtaaccgcgcaggagcctcctctggcttgagccctttcttggtaagt

SEQ ID NO: 531 - DNA, 80 bp, Homo sapiens
  misc_feature (1)..(80): Pre-microRNA sequence
ggtccagataacagaagagagagcaaaggaaaaagaattttttgaagatcaaaagtggctgttcattttgttatctgacc

SEQ ID NO: 532 - DNA, 68 bp, Homo sapiens
  misc_feature (1)..(68): Pre-microRNA sequence
catctttgtggctcctggttgctaggagcaggtgcttctgttactaagcaacaggagcctgttggatg

SEQ ID NO: 533 - DNA, 82 bp, Homo sapiens
  misc_feature (1)..(82): Pre-microRNA sequence
tcaatttgttacatagctaacttattttctaatagactatgttggtaataagaaaatgaattacatgctgttggcagagtga

SEQ ID NO: 534 - DNA, 87 bp, Homo sapiens
  misc_feature (1)..(87): Pre-microRNA sequence
ggcggctgcggaggctggcgcgggctgctgcacctttaacgctttctggcgctgacaggcggcggcccagctaaagttcacagcgcc

SEQ ID NO: 535 - DNA, 79 bp, Homo sapiens
  misc_feature (1)..(79): Pre-microRNA sequence
ggcaggaaggcctccggcttcacaaagtggccctgggcatccaggaagtgttcggggtggaagcggaagggcttcttcc

SEQ ID NO: 536 - DNA, 72 bp, Homo sapiens
  misc_feature (1)..(72): Pre-microRNA sequence
cggggcaggggagggggtgggcagggcacaagcctcccactgtgccgtgtccccaccctcccccgttccccg

SEQ ID NO: 537 - DNA, 85 bp, Homo sapiens
  misc_feature (1)..(85): Pre-microRNA sequence
tcttagtgctttctaattaaaaaggaggggagtggtgatctttttgctctctaagttctgtttcctctgagtggaaagcagaggg

SEQ ID NO: 538 - DNA, 72 bp, Homo sapiens
  misc_feature (1)..(72): Pre-microRNA sequence
cccacgcacggagggtcgccaggaaagtggacattaccgctttaattaacttcgagatgctccggcggcggg

SEQ ID NO: 539 - DNA, 90 bp, Homo sapiens
  misc_feature (1)..(90): Pre-microRNA sequence
gaataccattaatctgttcactaggagattaatttgcaatttgttggcaaatcacatgtgggtcttgtagcaagagcgtgggtggtgttt

SEQ ID NO: 540 - DNA, 88 bp, Homo sapiens
  misc_feature (1)..(88): Pre-microRNA sequence
caggggatttgttaccgctgatgtgtggcccgtccgaatgaagggggcttttcattaacaaagtagcgggcggtgtcatcttcccctg

SEQ ID NO: 541 - DNA, 76 bp, Homo sapiens
  misc_feature (1)..(76): Pre-microRNA sequence
taattgcctgaatcgccgggttacatatctgttaggaaatctcttggcaatataaagaaggggctcaggacagtta

SEQ ID NO: 542 - DNA, 142 bp, Homo sapiens
  misc_feature (1)..(142): Pre-microRNA sequence
gtccagttctcaggggacaatactgatggcagccaaactgggcaaggatgcagtgtgggggcggagggggcatgacctctattcaagttctgtgtcttggcccctggctgaggtattgagtgtgaggaagggaacactgggc

SEQ ID NO: 543 - DNA, 95 bp, Homo sapiens
  misc_feature (1)..(95): Pre-microRNA sequence
ttgtacacaatattcgtctgtggttgaaagggggcacgctgaggtcaagtgatgtagtgttttccatttttccatatgagtctcacagtgtgcga

SEQ ID NO: 544 - DNA, 78 bp, Homo sapiens
  misc_feature (1)..(78): Pre-microRNA sequence
tagagggagaagaaacaactctgtctgatgtcttctgggatggccttaatacagatagcattgtctcttccatttctg

SEQ ID NO: 545 - DNA, 119 bp, Homo sapiens
  misc_feature (1)..(119): Pre-microRNA sequence
ggggaggggaccgggagggccgggcggccgcgacccccaacctctcggaggaggggctgccgctcgccgctccgctctttgttgtttggggctccgcgcctccccctctctccctcctc

SEQ ID NO: 546 - DNA, 69 bp, Homo sapiens
  misc_feature (1)..(69): Pre-microRNA sequence
ggggacgtggcccctcccccccggagcgggactccaagaactccggggggcgctgggggctgactttcc

SEQ ID NO: 547 - DNA, 80 bp, Homo sapiens
  misc_feature (1)..(80): Pre-microRNA sequence
tccccgccacccttggagcacctcagcgttcttaggggaagccagagccggggaggatgcgggaataggtttggtggggg

SEQ ID NO: 548 - DNA, 73 bp, Homo sapiens
  misc_feature (1)..(73): Pre-microRNA sequence
gatcaggttcccctcccccgcatacacctgggcgcaggtgaaagctcagggagcgggtgggggagcccgggtt

SEQ ID NO: 549 - DNA, 113 bp, Homo sapiens
  misc_feature (1)..(113): Pre-microRNA sequence
ctgggacgggcggggcgccgaggcccagggcgcctgaggggcgcagaggtgtcagcgtgcaaccgccgccccccagcgttcccgccaccaccgccaccaccctcaaagcccgg

SEQ ID NO: 550 - DNA, 114 bp, Homo sapiens
  misc_feature (1)..(114): Pre-microRNA sequence
ccggggctgggggtggaggatggcgaggatttgacaagttcagggccccctgggatcctttccctactccctggtcttgttggacaccctgtttacctgccctaattgccccgg

SEQ ID NO: 551 - DNA, 123 bp, Homo sapiens
  misc_feature (1)..(123): Pre-microRNA sequence
gggcagcgcccctccttccggagggcagcatcccggcgggggcgggggctcggctttgatgccagggcaccttttgtccctggagacgctctgccagccaggtgcgtggagggagtgcagccc

SEQ ID NO: 552 - DNA, 78 bp, Homo sapiens
  misc_feature (1)..(78): Pre-microRNA sequence
caggtgagaggctgagccccgggcgggggagggcgccaggcctggggcattaaccgtcccggggacccttttggcctg

SEQ ID NO: 553 - DNA, 90 bp, Homo sapiens
  misc_feature (1)..(90): Pre-microRNA sequence
cggaggtcgctcgctcgctcgctcggctcgctgactcgccggagcgctctgtggcggtcggcggcaggtcggtcgcgagagcgggctctg

SEQ ID NO: 554 - DNA, 145 bp, Homo sapiens
  misc_feature (1)..(145): Pre-microRNA sequence
gcgggcgggcggggaggtcggaagtactttgttttttatgctaatgagggagtggggcttgtccgtatttacgttgaggcgggagccgccgcccttcattcacccacatggtccttcgaggtgccgccgccgccgcccgacctgc

SEQ ID NO: 555 - DNA, 116 bp, Homo sapiens
  misc_feature (1)..(116): Pre-microRNA sequence
ccctttgcacctcccgggattgggcggtcagggccagggccccttgagagtctgggaatcccttctctgggcctcgctggggtcctggccaggaaggggctgggggtgacaagggg

SEQ ID NO: 556 - DNA, 107 bp, Homo sapiens
  misc_feature (1)..(107): Pre-microRNA sequence
tcttcctccaccctgccccacccctaggtctctttattgattcaaaggttaaggaagctcctgggggcttgagggggtggcacagttttggtggggcccagtgagga

SEQ ID NO: 557 - DNA, 81 bp, Homo sapiens
  misc_feature (1)..(81): Pre-microRNA sequence
acgggcgagcaaaccccaaatactcagcaacacaaaaatatgcctccgtgtgtgtgtgtgagtgtgcgtgtgcctgcgcgt

SEQ ID NO: 558 - DNA, 148 bp, Homo sapiens
  misc_feature (1)..(148): Pre-microRNA sequence
aaattaaagaaaaaaaattctccaccaaaagcgccgcagtgacagttcccaacattttctgcctttcttcttcccctccctgcaccactaggagggagaaggcacacaattgcattttcgtcgctttttaattttttttttttggttt

SEQ ID NO: 559 - DNA, 107 bp, Homo sapiens
  misc_feature (1)..(107): Pre-microRNA sequence
cccggctcggccccgcgtctctccagctcctccggctccttttagtgcataaattagtgatggcatttcccggagagcggagcacaacacagggcgccgggctcggg

SEQ ID NO: 560 - DNA, 85 bp, Homo sapiens
  misc_feature (1)..(85): Pre-microRNA sequence
tgcaggaaaatcagtaacattagtcatcttaaaagggttattactcaagatgatttaaattgtgaaaatgtcagtggagcctgca

SEQ ID NO: 561 - DNA, 86 bp, Homo sapiens
  misc_feature (1)..(86): Pre-microRNA sequence
ggccttcacccgggcagccaccttgtctccaggtctggccacgtagtctcctgaggcagggatggccccacagaggggtgggggcc

SEQ ID NO: 562 - DNA, 86 bp, Homo sapiens
  misc_feature (1)..(86): Pre-microRNA sequence
atggagatttctagcccttctaaagtctattaaaaacctttaaattctgctttagacaaaacataaaggagggttgggagctctgt

SEQ ID NO: 563 - DNA, 79 bp, Homo sapiens
  misc_feature (1)..(79): Pre-microRNA sequence
tggggtggcaggtattagggataatattcatttagctttctgagctttctggggagacttggtgaccatgccagctcca

SEQ ID NO: 564 - DNA, 87 bp, Homo sapiens
  misc_feature (1)..(87): Pre-microRNA sequence
agctacaccagaatgaggaataaaggggtttacatatgttccaattctaaacctatcaatcaaacccatgttattcctttgggagct

SEQ ID NO: 565 - DNA, 71 bp, Homo sapiens
  misc_feature (1)..(71): Pre-microRNA sequence
ccccggcgaggggtgtcagattgagtgctctgtgcgcatgtgcgaaggtgtccaaactgacaatgctgggg

SEQ ID NO: 566 - DNA, 88 bp, Homo sapiens
  misc_feature (1)..(88): Pre-microRNA sequence
gtccaccttccagcagatgtggatcagcaagcaggagtatgatgagtcaggcccctccattgtccaccgcaaatgcttctaggtggac

SEQ ID NO: 567 - DNA, 74 bp, Homo sapiens
  misc_feature (1)..(74): Pre-microRNA sequence
acatggctgaacaagataagggttttattcttgtgttagggacgtgctggggctgggatggaattcagctatgt

SEQ ID NO: 568 - DNA, 88 bp, Homo sapiens; identical to SEQ ID NO: 566
  misc_feature (1)..(88): Pre-microRNA sequence

SEQ ID NO: 569 - DNA, 87 bp, Homo sapiens
  misc_feature (1)..(87): Pre-microRNA sequence
gggtgctggtggacatggacggcgtgctggctgacttcgagggcggattcctcaggaagttccgcgcgcgctttcccgaccagccct

SEQ ID NO: 570 - DNA, 71 bp, Homo sapiens
  misc_feature (1)..(71): Pre-microRNA sequence
tgacgactggccccgcctcttcctctcggtcccatattgaactcgagttggaagaggcgagtccggtctca

SEQ ID NO: 571 - DNA, 84 bp, Homo sapiens
  misc_feature (1)..(84): Pre-microRNA sequence
agttcttgtagtccacatcgctgactaaggtctggcacttcttggccagcaccacccccagcatgtccactgggctgctgaact

SEQ ID NO: 572 - DNA, 79 bp, Homo sapiens
  misc_feature (1)..(79): Pre-microRNA sequence
tccttccaacccaaatgattatatgattaagataccagtacccagggggaattgatctgtgtataagggagggaagaga

SEQ ID NO: 573 - DNA, 75 bp, Homo sapiens
  misc_feature (1)..(75): Pre-microRNA sequence
gctctgcttccaggctgtatttttaggctggcatttaggtttggcctggggacaaggggctggaaaatgcaaggc

SEQ ID NO: 574 - DNA, 70 bp, Homo sapiens
  misc_feature (1)..(70): Pre-microRNA sequence
taagccagattctcaacttacgtaattctatgggaattcacagagttatattggttgagaatttggctta

SEQ ID NO: 575 - DNA, 71 bp, Homo sapiens
  misc_feature (1)..(71): Pre-microRNA sequence
atttgtttactgtagctggaggtgccgagtaatgaaatgcacttgtgtctgcagctcactgctaaacaaat

SEQ ID NO: 576 - DNA, 77 bp, Homo sapiens
  misc_feature (1)..(77): Pre-microRNA sequence
gctggggttcatcggagaaactccctgcgatgagccactagggtcacggacagggaactttttgatgagcgccgagt

SEQ ID NO: 577 - DNA, 84 bp, Homo sapiens
  misc_feature (1)..(84): Pre-microRNA sequence
ttccccaggcagcagcaggcgcacggccgtctggatctccctggaggtgatggtcgagcgcttgtcataatgcgccaggcggga

SEQ ID NO: 578 - DNA, 69 bp, Homo sapiens
  misc_feature (1)..(69): Pre-microRNA sequence
gggagtgtgctgggaactgggcagataaaaagggctggaacttattatttggctagactctcaattccc

SEQ ID NO: 579 - DNA, 78 bp, Homo sapiens
  misc_feature (1)..(78): Pre-microRNA sequence
agcacagctattggtgttttgcaggaggcaagtgaagcccatctggttggcctttttgaagacaccaaattgtgtgct

SEQ ID NO: 580 - DNA, 70 bp, Homo sapiens
  misc_feature (1)..(70): Pre-microRNA sequence
gcccagttaattggtctctcaacctacattagctgttgcattgcagccaattaggcaggggccagagggc

SEQ ID NO: 581 - DNA, 86 bp, Homo sapiens
  misc_feature (1)..(86): Pre-microRNA sequence
acagaccaggcacagaaagctgaaggtgctagagatgccaagtgaaacatgtgcatttttggtaactgtgtacttctggtgactgt

SEQ ID NO: 582 - DNA, 81 bp, Homo sapiens
  misc_feature (1)..(81): Pre-microRNA sequence
ccaccaacttgacatacacaggctcatcacagttggatgcaagcacacaaagatgggcttggcacttgtctaaggctttgg

SEQ ID NO: 583 - DNA, 75 bp, Homo sapiens
  misc_feature (1)..(75): Pre-microRNA sequence
attaatgtttttgtagcaaacaggaggcagagttctccaaaggctctcatctctgtgcttccagaaaatattgat

SEQ ID NO: 584 - DNA, 85 bp, Homo sapiens
  misc_feature (1)..(85): Pre-microRNA sequence
ttggggaatttggtgggttttcagaagttagcccttctggtgtagggtttgttgatttcgatacaccagattatactcgtcccaa

SEQ ID NO: 585 - DNA, 70 bp, Homo sapiens
  misc_feature (1)..(70): Pre-microRNA sequence
gattcctgctcccagagccataaagtgggagcccccatttattaattgggctgggactggggcgggggtc

SEQ ID NO: 586 - DNA, 72 bp, Homo sapiens
  misc_feature (1)..(72): Pre-microRNA sequence
ggacccctagaaagggccagagctggggtcagaggccacctcctccattctctgccctgctctgctgggtcc

SEQ ID NO: 587 - DNA, 77 bp, Homo sapiens
  misc_feature (1)..(77): Pre-microRNA sequence
ggagacaggacatagtcccagaggttgagctggcttatggagcccacaaaagactcagctgggctgaatccctctcc

SEQ ID NO: 588 - DNA, 88 bp, Homo sapiens
  misc_feature (1)..(88): Pre-microRNA sequence
tgtttccctgtggaaaagattactctaggcaaattttagaaaatgcttttaaaaagaatcttgtgtaagttgaaaacagagggaaaga

SEQ ID NO: 589 - DNA, 88 bp, Homo sapiens
  misc_feature (1)..(88): Pre-microRNA sequence
ggccctgagagcaatactcatattgattgcatttatttcactctagggaggagagataattcttcaatgtgggacacatctgggagcc

SEQ ID NO: 590 - DNA, 85 bp, Homo sapiens
  misc_feature (1)..(85): Pre-microRNA sequence
gtagctgctgctctgttagctatactgacttggagcttggctgtaggatcaagtttggggtgggtaactagtgggaggcagctgc

SEQ ID NO: 591 - DNA, 89 bp, Homo sapiens
  misc_feature (1)..(89): Pre-microRNA sequence
gctgaggtaggtgggtcagagtctggccaggtgagaggaggcaccccagtgcttggccctgactctgccccctggacaccttcttcagt

SEQ ID NO: 592 - DNA, 71 bp, Homo sapiens
  misc_feature (1)..(71): Pre-microRNA sequence
aagtggctctgaggcatcatggagaacagttgaaaatcacattgtcagctcgaaatgcatcaaagctattt

SEQ ID NO: 593 - DNA, 74 bp, Homo sapiens
  misc_feature (1)..(74): Pre-microRNA sequence
ctcccacggcctgaagctgctgccaagctatttttggttctgcacagttaaaaatagcttcacggaggtgggag

SEQ ID NO: 594 - DNA, 86 bp, Homo sapiens
  misc_feature (1)..(86): Pre-microRNA sequence
tcccccaacccatccattaggccagcaacgcttgtagagctcactgtgggctgtaatgtggcactggtgggctgggacaccaggga

SEQ ID NO: 595 - DNA, 85 bp, Homo sapiens
  misc_feature (1)..(85): Pre-microRNA sequence
ctcattgagggaagattgagcagaactggcattgcttgctttcgtcaaattgattgtgcccgtctgtttgatccaattcagtgag

SEQ ID NO: 596 - DNA, 74 bp, Homo sapiens
  misc_feature (1)..(74): Pre-microRNA sequence
ctctcccagcccagcctgagtccttgtgtatcgtggaaatgggtgggactgagaagcaggatgagctgggtgag

SEQ ID NO: 597 - DNA, 77 bp, Homo sapiens
  misc_feature (1)..(77): Pre-microRNA sequence
cccccacaggcttgaggccagaggaaacagcaactttcttcgctgggaaagtgttgtggggctcaagcatttggggg

SEQ ID NO: 598 - DNA, 84 bp, Homo sapiens
  misc_feature (1)..(84): Pre-microRNA sequence
gacatcttcctggcgacaggaattgccagcagcaacggccttggcggttgccatggtgatacccttggtcattcggatgaagtc

SEQ ID NO: 599 - DNA, 71 bp, Homo sapiens
  misc_feature (1)..(71): Pre-microRNA sequence
tctagggagataaagtgacagtgttgcttgttcaggctattgttcaaagaagcacgtcttttatttataga

SEQ ID NO: 600 - DNA, 85 bp, Homo sapiens
  misc_feature (1)..(85): Pre-microRNA sequence
ttggaggcagaagctctggcccctatggtggtggaagccagtactttgccaaaccacaaaaccaaggtggctggggtggttccag

SEQ ID NO: 601 - DNA, 82 bp, Homo sapiens
  misc_feature (1)..(82): Pre-microRNA sequence
ttctattaatatgtatcatattggtatccattttcactaatgtgacatgagaggcagtaatgtgattacttttttagtggaa

SEQ ID NO: 602 - DNA, 70 bp, Homo sapiens
  misc_feature (1)..(70): Pre-microRNA sequence
gctggcattatggcagccaggatattgtcaggaggaacttggcagtgctcgtaggtgttatgatgctggc

SEQ ID NO: 603 - DNA, 89 bp, Homo sapiens
  misc_feature (1)..(89): Pre-microRNA sequence
agcctccttgtctggagattctaacaaatgggtttgcagtgttggaaactgtaaatcctcagggaacagatgatctggacaatgtagct

SEQ ID NO: 604 - DNA, 83 bp, Homo sapiens
  misc_feature (1)..(83): Pre-microRNA sequence
ccctccttgatctggggaactatttcttcattccagaaggtcagagctctggcaatagtgtccttcagactctcacaggaggg

SEQ ID NO: 605 - DNA, 78 bp, Homo sapiens
  misc_feature (1)..(78): Pre-microRNA sequence
ctgcagtgggaaagtcaagcctggtattacgttttgtcaaagggcagttccatgagtaccaggagagcaccattggag

SEQ ID NO: 606 - DNA, 87 bp, Homo sapiens
  misc_feature (1)..(87): Pre-microRNA sequence
gctggattctgcccttggatacacacaacaaaacccccattgaagtcaatggaaattgtgcatgcatatccaggggcagaatttggc

SEQ ID NO: 607 - DNA, 77 bp, Homo sapiens
  misc_feature (1)..(77): Pre-microRNA sequence
tcccagaatatggaggcaccaaagtagttctagatgacaaggattatttcctatttagagatggtgacattcttgga

SEQ ID NO: 608 - DNA, 73 bp, Homo sapiens
  misc_feature (1)..(73): Pre-microRNA sequence
ctcagtatcttcagcttgggaaactgacctcgttaattttaatgaggggaaaaattctccagctggggctgag

SEQ ID NO: 609 - DNA, 71 bp, Homo sapiens
  misc_feature (1)..(71): Pre-microRNA sequence
gcacattataaactctaattcattaacgtcatcataaatggtaatgtcctgtgaaaaagagaggtggtggc

SEQ ID NO: 610 - DNA, 86 bp, Homo sapiens
  misc_feature (1)..(86): Pre-microRNA sequence
caggctgacaactgatatcacaagaccacagctaagagtggtttattacttttagtgggatttatttaattcagtctcacagcctg

SEQ ID NO: 611 - DNA, 90 bp, Homo sapiens
  misc_feature (1)..(90): Pre-microRNA sequence
ctttggaggcagaagctctggcccctatggtggtggaggccaatactttgccaaaccacaaaaccaaggtggctatggcggttccagtag

SEQ ID NO: 612 - DNA, 87 bp, Homo sapiens
  misc_feature (1)..(87): Pre-microRNA sequence
agaattaactgctggacccagaggctgaaggcacgttgaaggaatccttcatttcttgagcccttggtttgaaaagctagtgatttt

SEQ ID NO: 613 - DNA, 89 bp, Homo sapiens
  misc_feature (1)..(89): Pre-microRNA sequence
ttcaaagaaattacttagcaattaaaccttcagcaaaattgtaattcattttaaatttagcacggaggtttgatgctgtttctgaggaa

SEQ ID NO: 614 - DNA, 89 bp, Homo sapiens
  misc_feature (1)..(89): Pre-microRNA sequence
tctccttctttcaaacatgtcagtgaccaatttcctacagtaagtttagtgggtcctggtgctgacagtataggttgacttgaagtaga

SEQ ID NO: 615 - DNA, 69 bp, Homo sapiens
  misc_feature (1)..(69): Pre-microRNA sequence
atgcactctgctgtcatttgcagcctgacctgcaggtcaggggtgatgtgagctggctcagggatgcat

SEQ ID NO: 616 - DNA, 76 bp, Homo sapiens
  misc_feature (1)..(76): Pre-microRNA sequence
attcaacacagattcaggtgctctcaacagccatgaaaatatatggctgaagagggaatctataaatgtaatgaat

SEQ ID NO: 617 - DNA, 90 bp, Homo sapiens; identical to SEQ ID NO: 476
  misc_feature (1)..(90): Pre-microRNA sequence

SEQ ID NO: 618 - DNA, 81 bp, Homo sapiens
  misc_feature (1)..(81): Pre-microRNA sequence
caaatgtgggagcttggatcaatgttgaagaataattttcatcatagtgaaaatgttggttcaaataaatttctacacttg

SEQ ID NO: 619 - DNA, 89 bp, Homo sapiens
  misc_feature (1)..(89): Pre-microRNA sequence
gctcacatgggaatccaaaaccttctaattttctatacagattcatttcagaatcaattagagttggtggcagccttctccctgtgtgc

SEQ ID NO: 620 - DNA, 83 bp, Homo sapiens
  misc_feature (1)..(83): Pre-microRNA sequence
caggtatgtaactgtggagacagcagcgctgcagaagaggcctcctgatcagaaagaatgtctgtcccacagttgactctctg

SEQ ID NO: 621 - DNA, 90 bp, Homo sapiens
  misc_feature (1)..(90): Pre-microRNA sequence
gtaggaaacacagctaatggggcttagcaacagatggggagccagcacaaagctgtaggttcttcctctgcctcggctgtgacttcctgc

SEQ ID NO: 622 - DNA, 82 bp, Homo sapiens
  misc_feature (1)..(82): Pre-microRNA sequence
tcatctcggggcctggtgaattaggacgacatcggcattttttattgctaaagacgtccagattgatccagcccttggctga

SEQ ID NO: 623 - DNA, 85 bp, Homo sapiens
  misc_feature (1)..(85): Pre-microRNA sequence
gggattgatctgagggacacagagcccaggttccattaaagtgtattaatgccaaggtctgtgcaattagtgaaaagtcaattcc

SEQ ID NO: 624 - DNA, 88 bp, Homo sapiens
  misc_feature (1)..(88): Pre-microRNA sequence
ggcttgggctttgttggtcttccactgctctgctacatcatttgctaatggatcgtctggattgggagcacataacaaggcctgggtt

SEQ ID NO: 625 - DNA, 81 bp, Homo sapiens
  misc_feature (1)..(81): Pre-microRNA sequence
cctggatgctgtttcattatgtagagtcaggcaaaagacagacggatgtgtgtgtgaggcggcgatgaagctggcaccagg

SEQ ID NO: 626 - DNA, 86 bp, Homo sapiens
  misc_feature (1)..(86): Pre-microRNA sequence
cagctggcctggtgccctggtgcgtggaggtgtagctgggctctgacccagctcctcaaacaggttccatatggccctcccggctg

SEQ ID NO: 627 - DNA, 75 bp, Homo sapiens
  misc_feature (1)..(75): Pre-microRNA sequence
cctccccaagcaatctgctcacccacttgttgtcatggtgactctggctgggggtgtggggactgagtggggagg

SEQ ID NO: 628 - DNA, 80 bp, Homo sapiens
  misc_feature (1)..(80): Pre-microRNA sequence
aggaggccctgagtgctagtagccacttatagaaagtcgcttccagcaattcttctaggagtggagcctcagggctgcct

SEQ ID NO: 629 - DNA, 86 bp, Homo sapiens
  misc_feature (1)..(86): Pre-microRNA sequence
ctcctagtggtatctgtcataaagatactgttcaaggcatatttcattatattttatagtgtcctctttatggtgacccttgggag

SEQ ID NO: 630 - DNA, 90 bp, Homo sapiens
  misc_feature (1)..(90): Pre-microRNA sequence
gggagacattccacttataggaggcaaagagcaggatatctgcacaggaagagttcatcttatatgactttcggggatggattgtctcct

SEQ ID NO: 631 - DNA, 80 bp, Homo sapiens
  misc_feature (1)..(80): Pre-microRNA sequence
agagcgcagctactggtgctttgcaggaggcaagtgaggcctatctggttggcctttttgaagacaccaacctgtgcgct

SEQ ID NO: 632 - DNA, 89 bp, Homo sapiens
  misc_feature (1)..(89): Pre-microRNA sequence
ggtcatgctatgcctggggtgagttttgcctcggggctccaggcggcactggagcagagctgagctaattttacccacaggagctgact

SEQ ID NO: 633 - DNA, 80 bp, Homo sapiens
  misc_feature (1)..(80): Pre-microRNA sequence
cttcttataagtctgtggtcacagtatgttttttgcagttcagcatctggctctgtgggatactgatggcttctaggaag

SEQ ID NO: 634 - DNA, 84 bp, Homo sapiens
  misc_feature (1)..(84): Pre-microRNA sequence
tgcctgctctggccagaaccaaagcacgtgtcagcttttttatttagggcaagaggtgcagaatggactgggccagtccaggca

SEQ ID NO: 635 - DNA, 90 bp, Homo sapiens
  misc_feature (1)..(90): Pre-microRNA sequence
ttttacacattgtcagctgcatctattaattttcttactgtcagagacagttaagggagcctttgtggaaacatctgaggatttgtaaaa

SEQ ID NO: 636 - DNA, 81 bp, Homo sapiens
  misc_feature (1)..(81): Pre-microRNA sequence
tgcagcagaacagtctggggccatttagcttaggggcaaatagttcctcatacttcaaagagccctaaggacattgctgca

SEQ ID NO: 637 - DNA, 74 bp, Homo sapiens
  misc_feature (1)..(74): Pre-microRNA sequence
ttattatgcaacatctgctctgaatttcaaatgtgataaacagagtatgagtgtcggtggcagatggctaatga

SEQ ID NO: 638 - DNA, 84 bp, Homo sapiens
  misc_feature (1)..(84): Pre-microRNA sequence
gagctgctttgaattgctcgcagtttgccggaggcggtgtgctgggttggacgctccgggaaacaaagcaacccaaaacagctc

SEQ ID NO: 639 - DNA, 84 bp, Homo sapiens
  misc_feature (1)..(84): Pre-microRNA sequence
tcaggaaaggtcatgggaaaaatgctgtagaattttctaatggttcatccatcaaaaatgcagctctccattgattcttcccga

SEQ ID NO: 640 - DNA, 84 bp, Homo sapiens
  misc_feature (1)..(84): Pre-microRNA sequence
gtgcttttctttccccccaaagaagtcataccaggtatatatagagagatctataatgcccttctgttgggggaatgaaagcac

SEQ ID NO: 641 - DNA, 86 bp, Homo sapiens
  misc_feature (1)..(86): Pre-microRNA sequence
agcaagctggggagcccagataaatagagctttctgtttcctttcctggagtctaaaatatctgatctggaggttccctccctgct

SEQ ID NO: 642 - DNA, 89 bp, Homo sapiens
  misc_feature (1)..(89): Pre-microRNA sequence
gaaagtgtcgggccttttgaaattgtcagagaaactgattttcttgtcaagtctcatcctgtacagttggagggccaaattctactttc

SEQ ID NO: 643 - DNA, 75 bp, Homo sapiens
  misc_feature (1)..(75): Pre-microRNA sequence
caggcattgcctggctcagagacctttgctgctgagcaaactgagttaacaaagtgggctgaggggtgaagcctg

SEQ ID NO: 644 - DNA, 84 bp, Homo sapiens
  misc_feature (1)..(84): Pre-microRNA sequence
tgtttccagcattcccaggtaggccaaggtgtcctacagaaaaaccttgggttagacctacagggggtctggctggtgttaaca

SEQ ID NO: 645 - DNA, 77 bp, Homo sapiens
  misc_feature (1)..(77): Pre-microRNA sequence
caagtttcctgagccctgggttgatatactgtaccatctttggtgcagctgtaattttaacaaggggaaccgacttg

SEQ ID NO: 646 - DNA, 76 bp, Homo sapiens
  misc_feature (1)..(76): Pre-microRNA sequence
ctcttcccatatttaatgtggctctaattctgacttcattgcagagcggtgaaatcaaattaggaaatgggaggag

SEQ ID NO: 647 - DNA, 73 bp, Homo sapiens
  misc_feature (1)..(73): Pre-microRNA sequence
attccaagggtctgacacttgtctaaatcctgtagaaatgagatcaagggcaaagggcacagatcctgggaat

SEQ ID NO: 648 - DNA, 77 bp, Homo sapiens
  misc_feature (1)..(77): Pre-microRNA sequence
gagcagttcttgttgcccatcacattttagtgcagggaagtgctttgccctaaaggtgccaggtaaagagaattgcc

SEQ ID NO: 649 - DNA, 76 bp, Homo sapiens
  misc_feature (1)..(76): Pre-microRNA sequence
gtgggagacatcgggtgggggccctggcgaacaataggtgggcccagctggggccccctcctgcctgcctcaccgc

SEQ ID NO: 650 - DNA, 81 bp, Homo sapiens
  misc_feature (1)..(81): Pre-microRNA sequence
tgggcagagccaggtctgcaccctcgggagccctggaggccaggtgagctgctgcagagggcacagacaggctcatactca

SEQ ID NO: 651 - DNA, 78 bp, Homo sapiens
  misc_feature (1)..(78): Pre-microRNA sequence
tagatgggaatttgagtggcattgtttctcaggcctgctggaggctgggggatagtaaattttctcaaataccattta

SEQ ID NO: 652 - DNA, 83 bp, Homo sapiens
  misc_feature (1)..(83): Pre-microRNA sequence
gccttaacctttttatcatttatcttcttgtattaatgtcactgaattattaattcatgagccaggatgggaagggtgaaggc

SEQ ID NO: 653 - DNA, 89 bp, Homo sapiens
  misc_feature (1)..(89): Pre-microRNA sequence
gctggctcctgctcagagtgacagcaccctgtggagtctgctggtactgacctaaccaccacagagccccactggagcatggagccagc

SEQ ID NO: 654 - DNA, 83 bp, Homo sapiens
  misc_feature (1)..(83): Pre-microRNA sequence
tgatcaggcgcttgatatgacaggctgtgggagtcaggaccccttgaacagagtgggccttgtctgtcacagtccgcctgaca

SEQ ID NO: 655 - DNA, 80 bp, Homo sapiens
  misc_feature (1)..(80): Pre-microRNA sequence
ctgttgagtgggtgttggtgtgggtaacaataatgttgttttcataatatgtgctggcagattagcacacttctctacag

SEQ ID NO: 656 - DNA, 71 bp, Homo sapiens; identical to SEQ ID NO: 570
  misc_feature (1)..(71): Pre-microRNA sequence

SEQ ID NO: 657 - DNA, 80 bp, Homo sapiens
  misc_feature (1)..(80): Pre-microRNA sequence
tgggatgaggtagtaggttgtatagttttagggtcacacccaccactgggagataactatacaatctactgtctttccta

SEQ ID NO: 658 - DNA, 72 bp, Homo sapiens
  misc_feature (1)..(72): Pre-microRNA sequence
aggttgaggtagtaggttgtatagtttagaattacatcaagggagataactgtacagcctcctagctttcct

SEQ ID NO: 659 - DNA, 74 bp, Homo sapiens
  misc_feature (1)..(74): Pre-microRNA sequence
gggtgaggtagtaggttgtatagtttggggctctgccctgctatgggataactatacaatctactgtctttcct

SEQ ID NO: 660 - DNA, 83 bp, Homo sapiens
  misc_feature (1)..(83): Pre-microRNA sequence
cggggtgaggtagtaggttgtgtggtttcagggcagtgatgttgcccctcggaagataactatacaacctactgccttccctg

SEQ ID NO: 661 - DNA, 84 bp, Homo sapiens
  misc_feature (1)..(84): Pre-microRNA sequence
gcatccgggttgaggtagtaggttgtatggtttagagttacaccctgggagttaactgtacaaccttctagctttccttggagc

SEQ ID NO: 662 - DNA, 87 bp, Homo sapiens
  misc_feature (1)..(87): Pre-microRNA sequence
cctaggaagaggtagtaggttgcatagttttagggcagggattttgcccacaaggaggtaactatacgacctgctgcctttcttagg

SEQ ID NO: 663 - DNA, 79 bp, Homo sapiens
  misc_feature (1)..(79): Pre-microRNA sequence
cccgggctgaggtaggaggttgtatagttgaggaggacacccaaggagatcactatacggcctcctagctttccccagg

SEQ ID NO: 664 - DNA, 87 bp, Homo sapiens
  misc_feature (1)..(87): Pre-microRNA sequence
tcagagtgaggtagtagattgtatagttgtggggtagtgattttaccctgttcaggagataactatacaatctattgccttccctga

SEQ ID NO: 665 - DNA, 83 bp, Homo sapiens
  misc_feature (1)..(83): Pre-microRNA sequence
tgtgggatgaggtagtagattgtatagttttagggtcataccccatcttggagataactatacagtctactgtctttcccacg

SEQ ID NO: 666 - DNA, 84 bp, Homo sapiens
  misc_feature (1)..(84): Pre-microRNA sequence
aggctgaggtagtagtttgtacagtttgagggtctatgataccacccggtacaggagataactgtacaggccactgccttgcca

SEQ ID NO: 667 - DNA, 84 bp, Homo sapiens
  misc_feature (1)..(84): Pre-microRNA sequence
ctggctgaggtagtagtttgtgctgttggtcgggttgtgacattgcccgctgtggagataactgcgcaagctactgccttgcta

SEQ ID NO: 668 - DNA, 80 bp, Homo sapiens
  misc_feature (1)..(80): Pre-microRNA sequence
cctgttgccacaaacccgtagatccgaacttgtggtattagtccgcacaagcttgtatctataggtatgtgtctgttagg

SEQ ID NO: 669 - DNA, 85 bp, Homo sapiens
  misc_feature (1)..(85): Pre-microRNA sequence
gtgaggactcgggaggtggagggtggtgccgccggggccgggcgctgtttcagctcgcttctccccccacctcctctctcctcag

SEQ ID NO: 670 - DNA, 90 bp, Homo sapiens
  misc_feature (1)..(90): Pre-microRNA sequence
gtgggtacggcccagtgggggggagagggacacgccctgggctctgcccagggtgcagccggactgactgagcccctgtgccgcccccag

SEQ ID NO: 671 - DNA, 73 bp, Homo sapiens
  misc_feature (1)..(73): Pre-microRNA sequence
gtgggcgggggcaggtgtgtggtgggtggtggcctgcggtgagcagggccctcacacctgcctcgccccccag

SEQ ID NO: 672 - DNA, 86 bp, Homo sapiens
  misc_feature (1)..(86): Pre-microRNA sequence
tgccagtctctaggtccctgagaccctttaacctgtgaggacatccagggtcacaggtgaggttcttgggagcctggcgtctggcc

SEQ ID NO: 673 - DNA, 88 bp, Homo sapiens
  misc_feature (1)..(88): Pre-microRNA sequence
tgcgctcctctcagtccctgagaccctaacttgtgatgtttaccgtttaaatccacgggttaggctcttgggagctgcgagtcgtgct

SEQ ID NO: 674 - DNA, 89 bp, Homo sapiens
  misc_feature (1)..(89): Pre-microRNA sequence
accagacttttcctagtccctgagaccctaacttgtgaggtattttagtaacatcacaagtcaggctcttgggacctaggcggagggga

SEQ ID NO: 675 - DNA, 85 bp, Homo sapiens
  misc_feature (1)..(85): Pre-microRNA sequence
cgctggcgacgggacattattacttttggtacgcgctgtgacacttcaaactcgtaccgtgagtaataatgcgccgtccacggca

SEQ ID NO: 676 - DNA, 90 bp, Homo sapiens
  misc_feature (1)..(90): Pre-microRNA sequence
aggcctcgctgttctctatggctttttattcctatgtgattctactgctcactcatatagggattggagccgtggcgcacggcggggaca

SEQ ID NO: 677 - DNA, 87 bp, Homo sapiens
  misc_feature (1)..(87): Pre-microRNA sequence
gacagtgcagtcacccataaagtagaaagcactactaacagcactggagggtgtagtgtttcctactttatggatgagtgtactgtg

SEQ ID NO: 678 - DNA, 88 bp, Homo sapiens
  misc_feature (1)..(88): Pre-microRNA sequence
caccttgtcctcacggtccagttttcccaggaatcccttagatgctaagatggggattcctggaaatactgttcttgaggtcatggtt

SEQ ID NO: 679 - DNA, 73 bp, Homo sapiens
  misc_feature (1)..(73): Pre-microRNA sequence
cctggcactgagaactgaattccataggctgtgagctctagcaatgccctgtggactcagttctggtgcccgg

SEQ ID NO: 680 - DNA, 89 bp, Homo sapiens
  misc_feature (1)..(89): Pre-microRNA sequence
gccggcgcccgagctctggctccgtgtcttcactcccgtgcttgtccgaggagggagggagggacgggggctgtgctggggcagctgga

SEQ ID NO: 681 - DNA, 84 bp, Homo sapiens
  misc_feature (1)..(84): Pre-microRNA sequence
ctccccatggccctgtctcccaacccttgtaccagtgctgggctcagaccctggtacaggcctgggggacagggacctggggac

SEQ ID NO: 682 - DNA, 65 bp, Homo sapiens
  misc_feature (1)..(65): Pre-microRNA sequence
ctgttaatgctaatcgtgataggggtttttgcctccaactgactcctacatattagcattaacag

SEQ ID NO: 683 - DNA, 89 bp, Homo sapiens
  misc_feature (1)..(89): Pre-microRNA sequence
gtcagcagtgccttagcagcacgtaaatattggcgttaagattctaaaattatctccagtattaactgtgctgctgaagtaaggttgac

SEQ ID NO: 684 - DNA, 81 bp, Homo sapiens
  misc_feature (1)..(81): Pre-microRNA sequence
gttccactctagcagcacgtaaatattggcgtagtgaaatatatattaaacaccaatattactgtgctgctttagtgtgac

SEQ ID NO: 685 - DNA, 110 bp, Homo sapiens
  misc_feature (1)..(110): Pre-microRNA sequence
cggaaaatttgccaagggtttgggggaacattcaacctgtcggtgagtttgggcagctcaggcaaaccatcgaccgttgagtggaccctgaggcctggaattgccatcct

SEQ ID NO: 686 - DNA, 62 bp, Homo sapiens
  misc_feature (1)..(62): Pre-microRNA sequence
tcattggtccagaggggagataggttcctgtgatttttccttcttctctatagaataaatga

SEQ ID NO: 687 - DNA, 71 bp, Homo sapiens
  misc_feature (1)..(71): Pre-microRNA sequence
gccaacccagtgttcagactacctgttcaggaggctctcaatgtgtacagtagtctgcacattggttaggc

SEQ ID NO: 688 - DNA, 110 bp, Homo sapiens
  misc_feature (1)..(110): Pre-microRNA sequence
aggaagcttctggagatcctgctccgtcgccccagtgttcagactacctgttcaggacaatgccgttgtacagtagtctgcacattggttagactgggcaagggagagca

SEQ ID NO: 689 - DNA, 110 bp, Homo sapiens
  misc_feature (1)..(110): Pre-microRNA sequence
ccagaggacacctccactccgtctacccagtgtttagactatctgttcaggactcccaaattgtacagtagtctgcacattggttaggctgggctgggttagaccctcgg

SEQ ID NO: 690 - DNA, 87 bp, Homo sapiens
  misc_feature (1)..(87): Pre-microRNA sequence
cactgttctatggttagttttgcaggtttgcatccagctgtgtgatattctgctgtgcaaatccatgcaaaactgactgtggtagtg

SEQ ID NO: 691 - DNA, 96 bp, Homo sapiens
  misc_feature (1)..(96): Pre-microRNA sequence
acattgctacttacaattagttttgcaggtttgcatttcagcgtatatatgtatatgtggctgtgcaaatccatgcaaaactgattgtgataatgt

SEQ ID NO: 692 - DNA, 95 bp, Homo sapiens
  misc_feature (1)..(95): Pre-microRNA sequence
ccagctcgggcagccgtggccatcttactgggcagcattggatggagtcaggtctctaatactgcctggtaatgatgacggcggagccctgcacg

SEQ ID NO: 693 - DNA, 68 bp, Homo sapiens
  misc_feature (1)..(68): Pre-microRNA sequence
ccctcgtcttacccagcagtgtttgggtgcggttgggagtctctaatactgccgggtaatgatggagg

SEQ ID NO: 694 - DNA, 110 bp, Homo sapiens
  misc_feature (1)..(110): Pre-microRNA sequence
aaagatcctcagacaatccatgtgcttctcttgtccttcattccaccggagtctgtctcatacccaaccagatttcagtggagtgaagttcaggaggcatggagctgaca

SEQ ID NO: 695 - DNA, 72 bp, Homo sapiens
  misc_feature (1)..(72): Pre-microRNA sequence
tgtcgggtagcttatcagactgatgttgactgttgaatctcatggcaacaccagtcgatgggctgtctgaca

SEQ ID NO: 696 - DNA, 73 bp, Homo sapiens
  misc_feature (1)..(73): Pre-microRNA sequence
ggccggctggggttcctggggatgggatttgcttcctgtcacaaatcacattgccagggatttccaaccgacc

SEQ ID NO: 697 - DNA, 97 bp, Homo sapiens
  misc_feature (1)..(97): Pre-microRNA sequence
ctcaggtgctctggctgcttgggttcctggcatgctgatttgtgacttaagattaaaatcacattgccagggattaccacgcaaccacgaccttggc

SEQ ID NO: 698 - DNA, 68 bp, Homo sapiens
  misc_feature (1)..(68): Pre-microRNA sequence
ctccggtgcctactgagctgatatcagttctcattttacacactggctcagttcagcaggaacaggag

SEQ ID NO: 699 - DNA, 73 bp, Homo sapiens
  misc_feature (1)..(73): Pre-microRNA sequence
ctctgcctcccgtgcctactgagctgaaacacagttggtttgtgtacactggctcagttcagcaggaacaggg

SEQ ID NO: 700 - DNA, 84 bp, Homo sapiens
  misc_feature (1)..(84): Pre-microRNA sequence
ggccagtgttgagaggcggagacttgggcaattgctggacgctgccctgggcattgcacttgtctcggtctgacagtgccggcc

SEQ ID NO: 701 - DNA, 77 bp, Homo sapiens
  misc_feature (1)..(77): Pre-microRNA sequence
gtggcctcgttcaagtaatccaggataggctgtgcaggtcccaatgggcctattcttggttacttgcacggggacgc

SEQ ID NO: 702 - DNA, 84 bp, Homo sapiens
  misc_feature (1)..(84): Pre-microRNA sequence
ggctgtggctggattcaagtaatccaggataggctgtttccatctgtgaggcctattcttgattacttgtttctggaggcagct

SEQ ID NO: 703 - DNA, 77 bp, Homo sapiens
  misc_feature (1)..(77): Pre-microRNA sequence
ccgggacccagttcaagtaattcaggataggttgtgtgctgtccagcctgttctccattacttggctcggggaccgg

SEQ ID NO: 704 - DNA, 78 bp, Homo sapiens
  misc_feature (1)..(78): Pre-microRNA sequence
ctgaggagcagggcttagctgcttgtgagcagggtccacaccaagtcgtgttcacagtggctaagttccgccccccag

SEQ ID NO: 705 - DNA, 97 bp, Homo sapiens
  misc_feature (1)..(97): Pre-microRNA sequence
acctctctaacaaggtgcagagcttagctgattggtgaacagtgattggtttccgctttgttcacagtggctaagttctgcacctgaagagaaggtg

SEQ ID NO: 706 - DNA, 88 bp, Homo sapiens
  misc_feature (1)..(88): Pre-microRNA sequence
tcaggtcttcagcagaagcagggaggttctcccagtggttttccttgactgtgaggaactagcctgctgctttgctcaggagtgagct

SEQ ID NO: 707 - DNA, 64 bp, Homo sapiens
  misc_feature (1)..(64): Pre-microRNA sequence
atgactgatttcttttggtgttcagagtcaatataattttctagcaccatctgaaatcggttat

SEQ ID NO: 708 - DNA, 81 bp, Homo sapiens
  misc_feature (1)..(81): Pre-microRNA sequence
cttcaggaagctggtttcatatggtggtttagatttaaatagtgattgtctagcaccatttgaaatcagtgttcttggggg

SEQ ID NO: 709 - DNA, 81 bp, Homo sapiens
  misc_feature (1)..(81): Pre-microRNA sequence
cttctggaagctggtttcacatggtggcttagatttttccatctttgtatctagcaccatttgaaatcagtgttttaggag

SEQ ID NO: 710 - DNA, 88 bp, Homo sapiens
  misc_feature (1)..(88): Pre-microRNA sequence
atctcttacacaggctgaccgatttctcctggtgttcagagtctgtttttgtctagcaccatttgaaatcggttatgatgtaggggga

SEQ ID NO: 711 - DNA, 71 bp, Homo sapiens
  misc_feature (1)..(71): Pre-microRNA sequence
gcgactgtaaacatcctcgactggaagctgtgaagccacagatgggctttcagtcggatgtttgcagctgc

SEQ ID NO: 712 - DNA, 88 bp, Homo sapiens
  misc_feature (1)..(88): Pre-microRNA sequence
accaagtttcagttcatgtaaacatcctacactcagctgtaatacatggattggctgggaggtggatgtttacttcagctgacttgga

SEQ ID NO: 713 - DNA, 89 bp, Homo sapiens
  misc_feature (1)..(89): Pre-microRNA sequence
accatgctgtagtgtgtgtaaacatcctacactctcagctgtgagctcaaggtggctgggagagggttgtttactccttctgccatgga

SEQ ID NO: 714 - DNA, 72 bp, Homo sapiens
  misc_feature (1)..(72): Pre-microRNA sequence
agatactgtaaacatcctacactctcagctgtggaaagtaagaaagctgggagaaggctgtttactctttct

SEQ ID NO: 715 - DNA, 70 bp, Homo sapiens
  misc_feature (1)..(70): Pre-microRNA sequence
gttgttgtaaacatccccgactggaagctgtaagacacagctaagctttcagtcagatgtttgctgctac

SEQ ID NO: 716 - DNA, 92 bp, Homo sapiens
  misc_feature (1)..(92): Pre-microRNA sequence
gggcagtctttgctactgtaaacatccttgactggaagctgtaaggtgttcagaggagctttcagtcggatgtttacagcggcaggctgcca

SEQ ID NO: 717 - DNA, 82 bp, Homo sapiens
  misc_feature (1)..(82): Pre-microRNA sequence
gcttcgctcccctccgccttctcttcccggttcttcccggagtcgggaaaagctgggttgagagggcgaaaaaggatgaggt

SEQ ID NO: 718 - DNA, 94 bp, Homo sapiens
  misc_feature (1)..(94): Pre-microRNA sequence
gagtttggttttgtttgggtttgttctaggtatggtcccagggatcccagatcaaaccaggcccctgggcctatcctagaaccaacctaagctc

SEQ ID NO: 719 - DNA, 67 bp, Homo sapiens
  misc_feature (1)..(67): Pre-microRNA sequence
gtggcactcaaactgtgggggcactttctgctctctggtgaaagtgccgccatcttttgagtgttac

SEQ ID NO: 720 - DNA, 69 bp, Homo sapiens
  misc_feature (1)..(69): Pre-microRNA sequence
gggatactcaaaatgggggcgctttcctttttgtctgtactgggaagtgcttcgattttggggtgtccc

SEQ ID NO: 721 - DNA, 64 bp, Homo sapiens
  misc_feature (1)..(64): Pre-microRNA sequence
ccccgcgacgagcccctcgcacaaaccggacctgagcgttttgttcgttcggctcgcgtgaggc

SEQ ID NO: 722 - DNA, 94 bp, Homo sapiens
  misc_feature (1)..(94): Pre-microRNA sequence
ataaaggaagttaggctgaggggcagagagcgagacttttctattttccaaaagctcggtctgaggcccctcagtcttgcttcctaacccgcgc

SEQ ID NO: 723 - DNA, 98 bp, Homo sapiens
  misc_feature (1)..(98): Pre-microRNA sequence
cgaggggatacagcagcaattcatgttttgaagtgttctaaatggttcaaaacgtgaggcgctgctataccccctcgtggggaaggtagaaggtgggg

SEQ ID NO: 724 - DNA, 76 bp, Homo sapiens
  misc_feature (1)..(76): Pre-microRNA sequence
gagggggaagacgggaggaaagaagggagtggttccatcacgcctcctcactcctctcctcccgtcttctcctctc

SEQ ID NO: 725 - DNA, 68 bp, Homo sapiens
  misc_feature (1)..(68): Pre-microRNA sequence
gcatcctgtactgagctgccccgaggcccttcatgctgcccagctcggggcagctcagtacaggatac

SEQ ID NO: 726 - DNA, 84 bp, Homo sapiens
  misc_feature (1)..(84): Pre-microRNA sequence
ttgacttagctgggtagtggggaacccttccatgaggagtagaacactccttatgcaagattcccttctacctggctgggttgg

SEQ ID NO: 727 - DNA, 129 bp, Homo sapiens
  misc_feature (1)..(129): Pre-microRNA sequence
gggatgccacattcagccattcagcgtacagtgcctttcacagggaggtgtcatttatgtgaactaaaatataaatttcacctttctgagaagggtaatgtacagcatgcactgcatatgtggtgtccc

SEQ ID NO: 728 - DNA, 127 bp, Homo sapiens
  misc_feature (1)..(127): Pre-microRNA sequence
ggatgccacattcagccattcagtgtgcagtgcctttcacagggaggtgtcatttatgtgaactaaaatataaatttcacctttctgagaagggtaatgtacagcatgcactgcatatgtggtgtcc

SEQ ID NO: 729 - DNA, 84 bp, Homo sapiens
  misc_feature (1)..(84): Pre-microRNA sequence
gtgtacagtgcctttcacaaggaggtgtcatttatgtgaactaaaatataaatgtcacctttttgagaggagtaatgtacagca

SEQ ID NO: 730 - DNA, 90 bp, Homo sapiens
  misc_feature (1)..(90): Pre-microRNA sequence
tctcaggctgtgaccttctcgaggaaagaagcactttctgttgtctgaaagaaaagaaagtgcttcctttcagagggttacggtttgaga

SEQ ID NO: 731 - DNA, 97 bp, Homo sapiens
  misc_feature (1)..(97): Pre-microRNA sequence
tgatgctttgctggctggtgcagtgcctgagggagtaagagccctgttgttgtaagatagtgtcttactccctcaggcacatctccaacaagtctct

SEQ ID NO: 732 - DNA, 97 bp, Homo sapiens
  misc_feature (1)..(97): Pre-microRNA sequence
tgatgctttgctggctggtgcagtgcctgagggagtaagagccctgttgttgtcagatagtgtcttactccctcaggcacatctccagcgagtctct

SEQ ID NO: 733 - DNA, 98 bp, Homo sapiens
  misc_feature (1)..(98): Pre-microRNA sequence
agaatgggcaaatgaacagtaaatttggaggcctggggccctccctgctgctggagaagtgtttgcacgggtgggccttgtctttgaaaggaggtgga

SEQ ID NO: 734 - DNA, 94 bp, Homo sapiens
  misc_feature (1)..(94): Pre-microRNA sequence
aattcagccctgccactggcttatgtcatgaccttgggctactcaggctgtctgcacaatgagccagttggacaggagcagtgccactcaactc

SEQ ID NO: 735 - DNA, 100 bp, Homo sapiens
  misc_feature (1)..(100): Pre-microRNA sequence
tcccatctggaccctgctgggcagggcttctgagctccttagcactagcaggaggggctccaggggccctccctccatggcagccaggacaggactctca

SEQ ID NO: 736 - DNA, 90 bp, Homo sapiens
  misc_feature (1)..(90): Pre-microRNA sequence
tctaagaaacgcagtggtctctgaagcctgcaggggcaggccagccctgcactgaacgcctgttcttgccaggtggcagaaggttgctgc

SEQ ID NO: 737 - DNA, 97 bp, Homo sapiens
  misc_feature (1)..(97): Pre-microRNA sequence
aacttaacatcatgctacctctttgtatcatattttgttattctggtcacagaatgacctagtattctgtaccagggaaggtagttcttaactatat

SEQ ID NO: 738 - DNA, 99 bp, Homo sapiens
  misc_feature (1)..(99): Pre-microRNA sequence
tggctaaggtgttggctcgggctccccactgcagttaccctcccctcggcgttactgagcactgggggctttcgggctctgcgtctgcacagatacttc

SEQ ID NO: 739 - DNA, 100 bp, Homo sapiens
  misc_feature (1)..(100): Pre-microRNA sequence
gtgagcgggcgcggcagggatcgcgggcgggtggcggcctagggcgcggagggcggaccgggaatggcgcgccgtgcgccgccggcgtaactgcggcgct

SEQ ID NO: 740 - DNA, 100 bp, Homo sapiens
  misc_feature (1)..(100): Pre-microRNA sequence
gctcggttgccgtggttgcgggccctgcccgcccgccagctcgctgacagcacgactcagggcggagggaagtaggtccgttggtcggtcgggaacgagg

SEQ ID NO: 741 - DNA, 93 bp, Homo sapiens
  misc_feature (1)..(93): Pre-microRNA sequence
ccttccggcgtcccaggcggggcgccgcgggaccgccctcgtgtctgtggcggtgggatcccgcggccgtgttttcctggtggcccggccatg

SEQ ID NO: 742 - DNA, 118 bp, Homo sapiens
  misc_feature (1)..(118): Pre-microRNA sequence
gcaggtgaactggcaggccaggaagaggaggaagccctggaggggctggaggtgatggatgttttcctccggttctcagggctccacctctttcgggccgtagagccagggctggtgc

SEQ ID NO: 743 - DNA, 73 bp, Homo sapiens
  misc_feature (1)..(73): Pre-microRNA sequence
cccagggtctggtgcggagagggcccacagtggacttggtgacgctgtatgccctcaccgctcagcccctggg

SEQ ID NO: 744 - DNA, 88 bp, Homo sapiens
  misc_feature (1)..(88): Pre-microRNA sequence
aactgccctcaaggagcttacaatctagctgggggtaaatgacttgcacatgaacacaactagactgtgagcttctagagggcaggga

SEQ ID NO: 745 - DNA, 98 bp, Homo sapiens
  misc_feature (1)..(98): Pre-microRNA sequence
ttgggcaaggtgcggggctagggctaacagcagtcttactgaaggtttcctggaaaccacgcacatgctgttgccactaacctcaaccttactcggtc

SEQ ID NO: 746 - DNA, 114 bp, Homo sapiens
  misc_feature (1)..(114): Pre-microRNA sequence
tttaggcgctgatgaaagtggagttcagtagacagcccttttcaagccctacgagaaactggggtttctggaggagaaggaaggtgatgaaggatctgttctcgtgagcctgaa

SEQ ID NO: 747 - DNA, 75 bp, Homo sapiens
  misc_feature (1)..(75): Pre-microRNA sequence
gtagttgttctacagaagacctggatgtgtaggagctaagacacactccaggggagctgtggaagcagtaacacg

SEQ ID NO: 748 - DNA, 55 bp, Homo sapiens
  misc_feature (1)..(55): Pre-microRNA sequence
tatttgtcagcggaggaaaagaaactaaccaggattccctcagtaatggcgagtg

SEQ ID NO: 749 - DNA, 75 bp, Homo sapiens
  misc_feature (1)..(75): Pre-microRNA sequence
tcatccctgggtggggatttgttgcattacttgtgttctatataaagtattgcacttgtcccggcctgtggaaga

SEQ ID NO: 750 - DNA, 96 bp, Homo sapiens
  misc_feature (1)..(96): Pre-microRNA sequence
cgggccccgggcgggcgggagggacgggacgcggtgcagtgttgttttttcccccgccaatattgcactcgtcccggcctccggcccccccggccc

SEQ ID NO: 751 - DNA, 80 bp, Homo sapiens
  misc_feature (1)..(80): Pre-microRNA sequence
ctgggggctccaaagtgctgttcgtgcaggtagtgtgattacccaacctactgctgagctagcacttcccgagcccccgg

SEQ ID NO: 752 - DNA, 119 bp, Homo sapiens
  misc_feature (1)..(119): Pre-microRNA sequence
aggattctgctcatgccagggtgaggtagtaagttgtattgttgtggggtagggatattaggccccaattagaagataactatacaacttactactttccctggtgtgtggcatattca

SEQ ID NO: 753 - DNA, 70 bp, Homo sapiens
  misc_feature (1)..(70): Pre-microRNA sequence
ggcacccacccgtagaaccgaccttgcggggccttcgccgcacacaagctcgtgtctgtgggtccgtgtc

SEQ ID NO: 754 - DNA, 78 bp, Homo sapiens
  misc_feature (1)..(78): Pre-microRNA sequence
tactgccctcggcttctttacagtgctgccttgttgcatatggatcaagcagcattgtacagggctatgaaggcattg

SEQ ID NO: 755 - DNA, 78 bp, Homo sapiens
  misc_feature (1)..(78): Pre-microRNA sequence
ttgtgctttcagcttctttacagtgctgccttgtagcattcaggtcaagcagcattgtacagggctatgaaagaacca

SEQ ID NO: 756 - DNA, 81 bp, Homo sapiens
  misc_feature (1)..(81): Pre-microRNA sequence
ccttggccatgtaaaagtgcttacagtgcaggtagctttttgagatctactgcaatgtaagcacttcttacattaccatgg

SEQ ID NO: 757 - DNA, 82 bp, Homo sapiens
  misc_feature (1)..(82): Pre-microRNA sequence
cctgccggggctaaagtgctgacagtgcagatagtggtcctctccgtgctaccgcactgtgggtacttgctgctccagcagg

SEQ ID NO: 758 - DNA, 81 bp, Homo sapiens
  misc_feature (1)..(81): Pre-microRNA sequence
ctctctgctttcagcttctttacagtgttgccttgtggcatggagttcaagcagcattgtacagggctatcaaagcacaga

SEQ ID NO: 759 - DNA, 89 bp, Homo sapiens
  misc_feature (1)..(89): Pre-microRNA sequence
tgctgctggccagagctcttttcacattgtgctactgtctgcacctgtcactagcagtgcaatgttaaaagggcattggccgtgtagtg

SEQ ID NO: 760 - DNA, 82 bp, Homo sapiens
  misc_feature (1)..(82): Pre-microRNA sequence
ggcctgcccgacactctttccctgttgcactactataggccgctgggaagcagtgcaatgatgaaagggcatcggtcaggtc

SEQ ID NO: 761 - DNA, 73 bp, Homo sapiens
  misc_feature (1)..(73): Pre-microRNA sequence
cagggtgtgtgactggttgaccagaggggcatgcactgtgttcaccctgtgggccacctagtcaccaaccctc

SEQ ID NO: 762 - DNA, 84 bp, Homo sapiens
  misc_feature (1)..(84): Pre-microRNA sequence
cgttgctgcagctggtgttgtgaatcaggccgacgagcagcgcatcctcttacccggctatttcacgacaccagggttgcatca

SEQ ID NO: 763 - DNA, 99 bp, Homo sapiens
  misc_feature (1)..(99): Pre-microRNA sequence
ccctggcatggtgtggtggggcagctggtgttgtgaatcaggccgttgccaatcagagaacggctacttcacaacaccagggccacaccacactacagg

SEQ ID NO: 764 - DNA, 83 bp, Homo sapiens
  misc_feature (1)..(83): Pre-microRNA sequence
ccttggagtaaagtagcagcacataatggtttgtggattttgaaaaggtgcaggccatattgtgctgcctcaaaaatacaagg

SEQ ID NO: 765 - DNA, 98 bp, Homo sapiens
  misc_feature (1)..(98): Pre-microRNA sequence
ttgaggccttaaagtactgtagcagcacatcatggtttacatgctacagtcaagatgcgaatcattatttgctgctctagaaatttaaggaaattcat

SEQ ID NO: 766 - DNA, 84 bp, Homo sapiens
  misc_feature (1)..(84): Pre-microRNA sequence
gtcagaataatgtcaaagtgcttacagtgcaggtagtgatatgtgcatctactgcagtgaaggcacttgtagcattatggtgac

SEQ ID NO: 767 - DNA, 110 bp, Homo sapiens
  misc_feature (1)..(110): Pre-microRNA sequence
agaagggctatcaggccagccttcagaggactccaaggaacattcaacgctgtcggtgagtttgggatttgaaaaaaccactgaccgttgactgtaccttggggtcctta

SEQ ID NO: 768 - DNA, 110 bp, Homo sapiens
  misc_feature (1)..(110): Pre-microRNA sequence
tgagttttgaggttgcttcagtgaacattcaacgctgtcggtgagtttggaattaaaatcaaaaccatcgaccgttgattgtaccctatggctaaccatcatctactcca

SEQ ID NO: 769 - DNA, 89 bp, Homo sapiens
  misc_feature (1)..(89): Pre-microRNA sequence
ctgatggctgcactcaacattcattgctgtcggtgggtttgagtctgaatcaactcactgatcaatgaatgcaaactgcggaccaaaca

SEQ ID NO: 770 - DNA, 110 bp, Homo sapiens
  misc_feature (1)..(110): Pre-microRNA sequence
cctgtgcagagattattttttaaaaggtcacaatcaacattcattgctgtcggtgggttgaactgtgtggacaagctcactgaacaatgaatgcaactgtggccccgctt

SEQ ID NO: 771 - DNA, 92 bp, Homo sapiens
  misc_feature (1)..(92): Pre-microRNA sequence
cggctggacagcgggcaacggaatcccaaaagcagctgttgtctccagagcattccagctgcgcttggatttcgtcccctgctctcctgcct

SEQ ID NO: 772 - DNA, 87 bp, Homo sapiens
  misc_feature (1)..(87): Pre-microRNA sequence
agcttccctggctctagcagcacagaaatattggcacagggaagcgagtctgccaatattggctgtgctgctccaggcagggtggtg

SEQ ID NO: 773 - DNA, 84 bp, Homo sapiens
  misc_feature (1)..(84): Pre-microRNA sequence
actggtcggtgatttaggtagtttcctgttgttgggatccacctttctctcgacagcacgacactgccttcattacttcagttg

SEQ ID NO: 774 - DNA, 82 bp, Homo sapiens
  misc_feature (1)..(82): Pre-microRNA sequence
gcagtcctctgttagttttgcatagttgcactacaagaagaatgtagttgtgcaaatctatgcaaaactgatggtggcctgc

SEQ ID NO: 775 - DNA, 71 bp, Homo sapiens
  misc_feature (1)..(71): Pre-microRNA sequence
gtagcactaaagtgcttatagtgcaggtagtgtttagttatctactgcattatgagcacttaaagtactgc

SEQ ID NO: 776 - DNA, 69 bp, Homo sapiens
  misc_feature (1)..(69): Pre-microRNA sequence
agtaccaaagtgctcatagtgcaggtagttttggcatgactctactgtagtatgggcacttccagtact

SEQ ID NO: 777 - DNA, 85 bp, Homo sapiens
  misc_feature (1)..(85): Pre-microRNA sequence
ggctgagccgcagtagttcttcagtggcaagctttatgtcctgacccagctaaagctgccagttgaagaactgttgccctctgcc

SEQ ID NO: 778 - DNA, 110 bp, Homo sapiens
  misc_feature (1)..(110): Pre-microRNA sequence
tgaacatccaggtctggggcatgaacctggcatacaatgtagatttctgtgttcgttaggcaacagctacattgtctgctgggtttcaggctacctggaaacatgttctc

SEQ ID NO: 779 - DNA, 110 bp, Homo sapiens
  misc_feature (1)..(110): Pre-microRNA sequence
gctgctggaaggtgtaggtaccctcaatggctcagtagccagtgtagatcctgtctttcgtaatcagcagctacatctggctactgggtctctgatggcatcttctagct

SEQ ID NO: 780 - DNA, 84 bp, Homo sapiens; identical to SEQ ID NO: 700
  misc_feature (1)..(84): Pre-microRNA sequence

SEQ ID NO: 781 - DNA, 88 bp, Homo sapiens; identical to SEQ ID NO: 710
  misc_feature (1)..(88): Pre-microRNA sequence

SEQ ID NO: 782 - DNA, 71 bp, Homo sapiens
  misc_feature (1)..(71): Pre-microRNA sequence
ggagaggaggcaagatgctggcatagctgttgaactgggaacctgctatgccaacatattgccatctttcc

SEQ ID NO: 783 - DNA, 94 bp, Homo sapiens
  misc_feature (1)..(94): Pre-microRNA sequence
tgttttgagcgggggtcaagagcaataacgaaaaatgtttgtcataaaccgtttttcattattgctcctgacctcctctcatttgctatattca

SEQ ID NO: 784 - DNA, 99 bp, Homo sapiens
  misc_feature (1)..(99): Pre-microRNA sequence
gaaactgggctcaaggtgaggggtgctatctgtgattgagggacatggttaatggaattgtctcacacagaaatcgcacccgtcaccttggcctactta

SEQ ID NO: 785 - DNA, 75 bp, Homo sapiens
  misc_feature (1)..(75): Pre-microRNA sequence
agacagagaagccaggtcacgtctctgcagttacacagctcacgagtgcctgctggggtggaacctggtctgtct

SEQ ID NO: 786 - DNA, 85 bp, Homo sapiens
  misc_feature (1)..(85): Pre-microRNA sequence
gctaagcacttacaactgtttgcagaggaaactgagactttgtaactatgtctcagtctcatctgcaaagaagtaagtgctttgc

SEQ ID NO: 787 - DNA, 81 bp, Homo sapiens
  misc_feature (1)..(81): Pre-microRNA sequence
gatactcgaaggagaggttgtccgtgttgtcttctctttatttatgatgaaacatacacgggaaacctcttttttagtatc

SEQ ID NO: 788 - DNA, 110 bp, Homo sapiens
  misc_feature (1)..(110): Pre-microRNA sequence
ttggatgttggcctagttctgtgtggaagactagtgattttgttgtttttagataactaaatcgacaacaaatcacagtctgccatatggcacaggccatgcctctacag

SEQ ID NO: 789 - DNA, 110 bp, Homo sapiens
  misc_feature (1)..(110): Pre-microRNA sequence
agattagagtggctgtggtctagtgctgtgtggaagactagtgattttgttgttctgatgtactacgacaacaagtcacagccggcctcatagcgcagactcccttcgac

SEQ ID NO: 790 - DNA, 110 bp, Homo sapiens
  misc_feature (1)..(110): Pre-microRNA sequence
ctggatacagagtggaccggctggccccatctggaagactagtgattttgttgttgtcttactgcgctcaacaacaaatcccagtctacctaatggtgccagccatcgca

SEQ ID NO: 791 - DNA, 78 bp, Homo sapiens
  misc_feature (1)..(78): Pre-microRNA sequence
ctttctacacaggttgggatcggttgcaatgctgtgtttctgtatggtattgcacttgtcccggcctgttgagtttgg

SEQ ID NO: 792 - DNA, 75 bp, Homo sapiens; identical to SEQ ID NO: 749
  misc_feature (1)..(75): Pre-microRNA sequence

SEQ ID NO: 793 - DNA, 81 bp, Homo sapiens
  misc_feature (1)..(81): Pre-microRNA sequence
cccattggcataaacccgtagatccgatcttgtggtgaagtggaccgcacaagctcgcttctatgggtctgtgtcagtgtg

SEQ ID NO: 794 - RNA, 22 nt, Homo sapiens
ugagguaguagguuguauaguu

SEQ ID NO: 795 - RNA, 22 nt, Homo sapiens
ugagguaguagguugugugguu

SEQ ID NO: 796 - RNA, 22 nt, Homo sapiens
ugagguaguagguuguaugguu

SEQ ID NO: 797 - RNA, 22 nt, Homo sapiens
agagguaguagguugcauaguu

SEQ ID NO: 798 - RNA, 22 nt, Homo sapiens
ugagguaggagguuguauaguu

SEQ ID NO: 799 - RNA, 22 nt, Homo sapiens
ugagguaguagauuguauaguu

SEQ ID NO: 800 - RNA, 22 nt, Homo sapiens
ugagguaguaguuuguacaguu

SEQ ID NO: 801 - RNA, 22 nt, Homo sapiens
ugagguaguaguuugugcuguu

SEQ ID NO: 802 - RNA, 22 nt, Homo sapiens
aacccguagauccgaacuugug

SEQ ID NO: 803 - RNA, 23 nt, Homo sapiens
agcagcauuguacagggcuauga

SEQ ID NO: 804 - RNA, 23 nt, Homo sapiens
aaaagugcuuacagugcagguag

SEQ ID NO: 805 - RNA, 21 nt, Homo sapiens
uaaagugcugacagugcagau

SEQ ID NO: 806 - RNA, 23 nt, Homo sapiens
agcagcauuguacagggcuauca

SEQ ID NO: 807 - RNA, 19 nt, Homo sapiens
gugaggacucgggaggugg

SEQ ID NO: 808 - RNA, 22 nt, Homo sapiens
guggguacggcccagugggggg

SEQ ID NO: 809 - RNA, 21 nt, Homo sapiens
gugggcgggggcaggugugug

SEQ ID NO: 810 - RNA, 24 nt, Homo sapiens
ucccugagacccuuuaaccuguga

SEQ ID NO: 811 - RNA, 22 nt, Homo sapiens
ucccugagacccuaacuuguga

SEQ ID NO: 812 - RNA, 22 nt, Homo sapiens
ucguaccgugaguaauaaugcg

SEQ ID NO: 813 - RNA, 22 nt, Homo sapiens
cagugcaauguuaaaagggcau

SEQ ID NO: 814 - RNA, 22 nt, Homo sapiens
cagugcaaugaugaaagggcau

SEQ ID NO: 815 - RNA, 22 nt, Homo sapiens
ugugacugguugaccagagggg

SEQ ID NO: 816 - RNA, 23 nt, Homo sapiens
agcugguguugugaaucaggccg

SEQ ID NO: 817 - RNA, 22 nt, Homo sapiens
uauagggauuggagccguggcg

SEQ ID NO: 818 - RNA, 23 nt, Homo sapiens
uguaguguuuccuacuuuaugga

SEQ ID NO: 819 - RNA, 23 nt, Homo sapiens
guccaguuuucccaggaaucccu

SEQ ID NO: 820 - RNA, 22 nt, Homo sapiens
ugagaacugaauuccauaggcu

SEQ ID NO: 821 - RNA, 21 nt, Homo sapiens
agggagggacgggggcugugc

SEQ ID NO: 822 - RNA, 22 nt, Homo sapiens
cugguacaggccugggggacag

SEQ ID NO: 823 - RNA, 23 nt, Homo sapiens
uuaaugcuaaucgugauaggggu

SEQ ID NO: 824 - RNA, 22 nt, Homo sapiens
uagcagcacauaaugguuugug

SEQ ID NO: 825 - RNA, 22 nt, Homo sapiens
uagcagcacaucaugguuuaca

SEQ ID NO: 826 - RNA, 22 nt, Homo sapiens
uagcagcacguaaauauuggcg

SEQ ID NO: 827 - RNA, 23 nt, Homo sapiens
caaagugcuuacagugcagguag

SEQ ID NO: 828 - RNA, 23 nt, Homo sapiens
aacauucaacgcugucggugagu

SEQ ID NO: 829 - RNA, 23 nt, Homo sapiens
aacauucauugcugucggugggu

SEQ ID NO: 830 - RNA, 22 nt, Homo sapiens
aacauucaaccugucggugagu

SEQ ID NO: 831 - RNA, 23 nt, Homo sapiens
caacggaaucccaaaagcagcug

SEQ ID NO: 832 - RNA, 21 nt, Homo sapiens
uagcagcacagaaauauuggc

SEQ ID NO: 833 - RNA, 22 nt, Homo sapiens
uagguaguuuccuguuguuggg

SEQ ID NO: 834 - RNA, 22 nt, Homo sapiens
gguccagaggggagauagguuc

SEQ ID NO: 835 - RNA, 22 nt, Homo sapiens
acaguagucugcacauugguua

SEQ ID NO: 836 - RNA, 22 nt, Homo sapiens
acaguagucugcacauugguua

SEQ ID NO: 837 - RNA, 23 nt, Homo sapiens
ugugcaaaucuaugcaaaacuga

SEQ ID NO: 838 - RNA, 23 nt, Homo sapiens
ugugcaaauccaugcaaaacuga

SEQ ID NO: 839 - RNA, 22 nt, Homo sapiens
uaauacugccugguaaugauga

SEQ ID NO: 840 - RNA, 23 nt, Homo sapiens
uaauacugccggguaaugaugga

SEQ ID NO: 841 - RNA, 22 nt, Homo sapiens
uccuucauuccaccggagucug

SEQ ID NO: 842 - RNA, 23 nt, Homo sapiens
uaaagugcuuauagugcagguag

SEQ ID NO: 843 - RNA, 23 nt, Homo sapiens
caaagugcucauagugcagguag

SEQ ID NO: 844 - RNA, 22 nt, Homo sapiens
uagcuuaucagacugauguuga

SEQ ID NO: 845 - RNA, 22 nt, Homo sapiens
aagcugccaguugaagaacugu

SEQ ID NO: 846 - RNA, 23 nt, Homo sapiens
agcuacauugucugcuggguuuc

SEQ ID NO: 847 - RNA, 21 nt, Homo sapiens
agcuacaucuggcuacugggu

SEQ ID NO: 848 - RNA, 21 nt, Homo sapiens
aucacauugccagggauuucc

SEQ ID NO: 849 - RNA, 22 nt, Homo sapiens
gggguuccuggggaugggauuu

SEQ ID NO: 850 - RNA, 21 nt, Homo sapiens
aucacauugccagggauuacc

SEQ ID NO: 851 - RNA, 22 nt, Homo sapiens
uggcucaguucagcaggaacag

SEQ ID NO: 852 - RNA, 22 nt, Homo sapiens
cauugcacuugucucggucuga

SEQ ID NO: 853 - RNA, 21 nt, Homo sapiens
aggcggagacuugggcaauug

SEQ ID NO: 854 - RNA, 22 nt, Homo sapiens
uucaaguaauccaggauaggcu

SEQ ID NO: 855 - RNA, 21 nt, Homo sapiens
uucaaguaauucaggauaggu

SEQ ID NO: 856 - RNA, 21 nt, Homo sapiens
uucacaguggcuaaguuccgc

SEQ ID NO: 857 - RNA, 21 nt, Homo sapiens
uucacaguggcuaaguucugc

SEQ ID NO: 858 - RNA, 24 nt, Homo sapiens
agcagaagcagggagguucuccca

SEQ ID NO: 859 - RNA, 22 nt, Homo sapiens
uagcaccaucugaaaucgguua

SEQ ID NO: 860 - RNA, 23 nt, Homo sapiens
uagcaccauuugaaaucaguguu

SEQ ID NO: 861 - RNA, 22 nt, Homo sapiens
uagcaccauuugaaaucgguua

SEQ ID NO: 862 - RNA, 22 nt, Homo sapiens
ugaccgauuucuccugguguuc

SEQ ID NO: 863 - RNA, 22 nt, Homo sapiens
uguaaacauccucgacuggaag

SEQ ID NO: 864 - RNA, 22 nt, Homo sapiens
uguaaacauccuacacucagcu

SEQ ID NO: 865 - RNA, 22 nt, Homo sapiens
cugggagguggauguuuacuuc

SEQ ID NO: 866 - RNA, 23 nt, Homo sapiens
uguaaacauccuacacucucagc

SEQ ID NO: 867 - RNA, 22 nt, Homo sapiens
cugggagaggguuguuuacucc

SEQ ID NO: 868 - RNA, 23 nt, Homo sapiens
uguaaacauccuacacucucagc

SEQ ID NO: 869 - RNA, 22 nt, Homo sapiens
uguaaacauccccgacuggaag

SEQ ID NO: 870 - RNA, 22 nt, Homo sapiens
uguaaacauccuugacuggaag

SEQ ID NO: 871 - RNA, 21 nt, Homo sapiens
aggcaagaugcuggcauagcu

SEQ ID NO: 872 - RNA, 22 nt, Homo sapiens
aaaagcuggguugagagggcga

SEQ ID NO: 873 - RNA, 21 nt, Homo sapiens
gccccugggccuauccuagaa

SEQ ID NO: 874 - RNA, 23 nt, Homo sapiens
ucaagagcaauaacgaaaaaugu

SEQ ID NO: 875 - RNA, 23 nt, Homo sapiens
ucucacacagaaaucgcacccgu

SEQ ID NO: 876 - RNA, 22 nt, Homo sapiens
gccugcugggguggaaccuggu

SEQ ID NO: 877 - RNA, 20 nt, Homo sapiens
acucaaacugugggggcacu

SEQ ID NO: 878 - RNA, 22 nt, Homo sapiens
acucaaaaugggggcgcuuucc

SEQ ID NO: 879 - RNA, 22 nt, Homo sapiens
uuuguucguucggcucgcguga

SEQ ID NO: 880 - RNA, 23 nt, Homo sapiens
ugaggggcagagagcgagacuuu

SEQ ID NO: 881 - RNA, 22 nt, Homo sapiens
cagcagcaauucauguuuugaa

SEQ ID NO: 882 - RNA, 22 nt, Homo sapiens
aacuguuugcagaggaaacuga

SEQ ID NO: 883 - RNA, 22 nt, Homo sapiens
aagacgggaggaaagaagggag

SEQ ID NO: 884 - RNA, 21 nt, Homo sapiens
cggggcagcucaguacaggau

SEQ ID NO: 885 - RNA, 22 nt, Homo sapiens
cuuaugcaagauucccuucuac

SEQ ID NO: 886 - RNA, 22 nt, Homo sapiens
aguggggaacccuuccaugagg

SEQ ID NO: 887 - RNA, 22 nt, Homo sapiens
ugaaacauacacgggaaaccuc

SEQ ID NO: 888 - RNA, 18 nt, Homo sapiens
uucacagggaggugucau

SEQ ID NO: 889 - RNA, 22 nt, Homo sapiens
uucacaaggaggugucauuuau

SEQ ID NO: 890 - RNA, 23 nt, Homo sapiens
uucucgaggaaagaagcacuuuc

SEQ ID NO: 891 - RNA, 23 nt, Homo sapiens
agugccugagggaguaagagccc

SEQ ID NO: 892 - RNA, 23 nt, Homo sapiens
guuugcacgggugggccuugucu

SEQ ID NO: 893 - RNA, 19 nt, Homo sapiens
gagccaguuggacaggagc

SEQ ID NO: 894 - RNA, 25 nt, Homo sapiens
gcugggcagggcuucugagcuccuu

SEQ ID NO: 895 - RNA, 23 nt, Homo sapiens
gaacgccuguucuugccaggugg

SEQ ID NO: 896 - RNA, 22 nt, Homo sapiens
aguauucuguaccagggaaggu

SEQ ID NO: 897 - RNA, 24 nt, Homo sapiens
acugggggcuuucgggcucugcgu

SEQ ID NO: 898 - RNA, 25 nt, Homo sapiens
agggaucgcgggcggguggcggccu

SEQ ID NO: 899 - RNA, 25 nt, Homo sapiens
ggcggagggaaguagguccguuggu

SEQ ID NO: 900 - RNA, 22 nt, Homo sapiens
aggcggggcgccgcgggaccgc

SEQ ID NO: 901 - RNA, 23 nt, Homo sapiens
aggaagcccuggaggggcuggag

SEQ ID NO: 902 - RNA, 23 nt, Homo sapiens
uggugcggagagggcccacagug

SEQ ID NO: 903 - RNA, 23 nt, Homo sapiens
uggaagacuagugauuuuguugu

SEQ ID NO: 904 - RNA, 23 nt, Homo sapiens
aaggagcuuacaaucuagcuggg

SEQ ID NO: 905 - RNA, 22 nt, Homo sapiens
ugcggggcuagggcuaacagca

SEQ ID NO: 906 - RNA, 21 nt, Homo sapiens
uggaggagaaggaaggugaug

SEQ ID NO: 907 - RNA, 20 nt, Homo sapiens
ggggagcuguggaagcagua

SEQ ID NO: 908 - RNA, 21 nt, Homo sapiens
gucagcggaggaaaagaaacu

SEQ ID NO: 909 - RNA, 22 nt, Homo sapiens
uauugcacuugucccggccugu

SEQ ID NO: 910 - RNA, 22 nt, Homo sapiens
ggguggggauuuguugcauuac

SEQ ID NO: 911 - RNA, 22 nt, Homo sapiens
agggacgggacgcggugcagug

SEQ ID NO: 912 - RNA, 23 nt, Homo sapiens
caaagugcuguucgugcagguag

SEQ ID NO: 913 - RNA, 22 nt, Homo sapiens
ugagguaguaaguuguauuguu

SEQ ID NO: 914 - RNA, 22 nt, Homo sapiens
aacccguagauccgaucuugug

SEQ ID NO: 915 - RNA, 22 nt, Homo sapiens
cacccguagaaccgaccuugcg

SEQ ID NO: 916 - RNA, 22 nt, Homo sapiens
acaucguuaccagacaguguua

SEQ ID NO: 917 - RNA, 17 nt, Homo sapiens
uggaggccccagcgaga

SEQ ID NO: 918 - RNA, 21 nt, Homo sapiens
cucccccacugcagcuggcac

SEQ ID NO: 919 - RNA, 22 nt, Homo sapiens
ugaagaagggggggaagggcgu

SEQ ID NO: 920 - RNA, 17 nt, Homo sapiens
gacagccucucccccac

SEQ ID NO: 921 - RNA, 22 nt, Homo sapiens
augcuuuuugggguaagggcuu

SEQ ID NO: 922 - RNA, 18 nt, Homo sapiens
aucacauucaccucccug

SEQ ID NO: 923 - RNA, 22 nt, Homo sapiens
agaaaaugccccucaguuuuga

SEQ ID NO: 924 - RNA, 21 nt, Homo sapiens
acguggaauuuccucuauguu

SEQ ID NO: 925 - RNA, 22 nt, Homo sapiens
acgguuuuaccagacaguauua

SEQ ID NO: 926 - RNA, 21 nt, Homo sapiens
uggaauguaaagaaguaugua

SEQ ID NO: 927 - RNA, 23 nt, Homo sapiens
ucuuugguuaucuagcuguauga

SEQ ID NO: 928 - RNA, 21 nt, Homo sapiens
uaaagcuagauaaccgaaagu

SEQ ID NO: 929 - RNA, 23 nt, Homo sapiens
uacccuguagauccgaauuugug

SEQ ID NO: 930 - RNA, 22 nt, Homo sapiens
uacccuguagaaccgaauuugu

SEQ ID NO: 931 - RNA, 20 nt, Homo sapiens
acugcagugaaggcacuugu

SEQ ID NO: 932 - RNA, 22 nt, Homo sapiens
uaaggugcaucuagugcagaua

SEQ ID NO: 933 - RNA, 22 nt, Homo sapiens
uaaagugcuuauagugcaggua

SEQ ID NO: 934 - RNA, 22 nt, Homo sapiens
aaggagcucacagucuauugag

SEQ ID NO: 935 - RNA, 22 nt, Homo sapiens
cuuucagucggauguuugcagc

SEQ ID NO: 936 - RNA, 21 nt, Homo sapiens
uauugcacauuacuaaguugc

SEQ ID NO: 937 - RNA, 19 nt, Homo sapiens
gugcauuguaguugcauug

SEQ ID NO: 938 - RNA, 22 nt, Homo sapiens
uggcagugucuuagcugguugu

SEQ ID NO: 939 - RNA, 22 nt, Homo sapiens
aggcagugucauuagcugauug

SEQ ID NO: 940 - RNA, 22 nt, Homo sapiens
aggcaguguaguuagcugauug

SEQ ID NO: 941 - RNA, 22 nt, Homo sapiens
uauugcacuugucccggccugu

SEQ ID NO: 942 - RNA, 22 nt, Homo sapiens
uucaacggguauuuauugagca

SEQ ID NO: 943 - RNA, 22 nt, Homo sapiens
uuuggcacuagcacauuuuugc

SEQ ID NO: 944 - RNA, 22 nt, Homo sapiens
uacaguacugugauaacugaag

SEQ ID NO: 945 - RNA, 20 nt, Homo sapiens
ucaaaugcucagacuccugu

SEQ ID NO: 946 - RNA, 23 nt, Homo sapiens
uggagugugacaaugguguuugu

SEQ ID NO: 947 - RNA, 22 nt, Homo sapiens
uuaaggcacgcggugaaugcca

SEQ ID NO: 948 - RNA, 21 nt, Homo sapiens
cauuauuacuuuugguacgcg

SEQ ID NO: 949 - RNA, 22 nt, Homo sapiens
ucggauccgucugagcuuggcu

SEQ ID NO: 950 - RNA, 22 nt, Homo sapiens
ucacagugaaccggucucuuuu

SEQ ID NO: 951 - RNA, 22 nt, Homo sapiens
ucacagugaaccggucucuuuc

SEQ ID NO: 952 - RNA, 21 nt, Homo sapiens
cuuuuugcggucugggcuugc

SEQ ID NO: 953 - RNA, 22 nt, Homo sapiens
uaacagucuacagccauggucg

SEQ ID NO: 954 - RNA, 22 nt, Homo sapiens
uugguccccuucaaccagcugu

SEQ ID NO: 955 - RNA, 21 nt, Homo sapiens
uugguccccuucaaccagcua

SEQ ID NO: 956 - RNA, 23 nt, Homo sapiens
uauggcuuuuuauuccuauguga

SEQ ID NO: 957 - RNA, 22 nt, Homo sapiens
uauggcuuuucauuccuaugug

SEQ ID NO: 958 - RNA, 23 nt, Homo sapiens
acuccauuuguuuugaugaugga

SEQ ID NO: 959 - RNA, 22 nt, Homo sapiens
uauugcuuaagaauacgcguag

SEQ ID NO: 960 - RNA, 18 nt, Homo sapiens
ucuacagugcacgugucu

SEQ ID NO: 961 - RNA, 21 nt, Homo sapiens
agugguuuuacccuaugguag

SEQ ID NO: 962 - RNA, 21 nt, Homo sapiens
aacacugucugguaaagaugg

SEQ ID NO: 963 - RNA, 20 nt, Homo sapiens
cauaaaguagaaagcacuac

SEQ ID NO: 964 - RNA, 22 nt, Homo sapiens
ugagaugaagcacuguagcuca

SEQ ID NO: 965 - RNA, 22 nt, Homo sapiens
uacaguauagaugauguacuag

SEQ ID NO: 966 - RNA, 22 nt, Homo sapiens
ugagaacugaauuccauggguu

SEQ ID NO: 967 - RNA, 20 nt, Homo sapiens
guguguggaaaugcuucugc

SEQ ID NO: 968 - RNA, 22 nt, Homo sapiens
ucagugcacuacagaacuuugu

SEQ ID NO: 969 - RNA, 22 nt, Homo sapiens
ucagugcaucacagaacuuugu

SEQ ID NO: 970 - RNA, 22 nt, Homo sapiens
ucuggcuccgugucuucacucc

SEQ ID NO: 971 - RNA, 22 nt, Homo sapiens
ucucccaacccuuguaccagug

SEQ ID NO: 972 - RNA, 22 nt, Homo sapiens
acuagacugaagcuccuugagg

SEQ ID NO: 973 - RNA, 21 nt, Homo sapiens
ucagugcaugacagaacuugg

SEQ ID NO: 974 - RNA, 20 nt, Homo sapiens
uugcauagucacaaaaguga

SEQ ID NO: 975 - RNA, 22 nt, Homo sapiens
uagguuauccguguugccuucg

SEQ ID NO: 976 - RNA, 22 nt, Homo sapiens
aaucauacacgguugaccuauu

SEQ ID NO: 977 - RNA, 22 nt, Homo sapiens
uuuggcaaugguagaacucaca

SEQ ID NO: 978 - RNA, 21 nt, Homo sapiens
ugguucuagacuugccaacua

SEQ ID NO: 979 - RNA, 23 nt, Homo sapiens
uauggcacugguagaauucacug

SEQ ID NO: 980 - RNA, 22 nt, Homo sapiens
uggacggagaacugauaagggu

SEQ ID NO: 981 - RNA, 18 nt, Homo sapiens
uggagagaaaggcaguuc

SEQ ID NO: 982 - RNA, 23 nt, Homo sapiens
caaagaauucuccuuuugggcuu

SEQ ID NO: 983 - RNA, 21 nt, Homo sapiens
ucgugucuuguguugcagccg

SEQ ID NO: 984 - RNA, 22 nt, Homo sapiens
caucccuugcaugguggagggu

SEQ ID NO: 985 - RNA, 23 nt, Homo sapiens
gugccuacugagcugauaucagu

SEQ ID NO: 986 - RNA, 22 nt, Homo sapiens
ugauauguuugauauauuaggu

SEQ ID NO: 987 - RNA, 21 nt, Homo sapiens
cugaccuaugaauugacagcc

SEQ ID NO: 988 - RNA, 21 nt, Homo sapiens
aacuggccuacaaagucccag

SEQ ID NO: 989 - RNA, 22 nt, Homo sapiens
uguaacagcaacuccaugugga

SEQ ID NO: 990 - RNA, 21 nt, Homo sapiens
uagguaguuucauguuguugg

SEQ ID NO: 991 - RNA, 22 nt, Homo sapiens
uucaccaccuucuccacccagc

SEQ ID NO: 992 - RNA, 22 nt, Homo sapiens
uaacacugucugguaacgaugu

SEQ ID NO: 993 - RNA, 22 nt, Homo sapiens
agagguauagggcaugggaaga

SEQ ID NO: 994 - RNA, 22 nt, Homo sapiens
gugaaauguuuaggaccacuag

SEQ ID NO: 995 - RNA, 22 nt, Homo sapiens
uucccuuugucauccuaugccu

SEQ ID NO: 996 - RNA, 22 nt, Homo sapiens
uggaauguaaggaagugugugg

SEQ ID NO: 997 - RNA, 22 nt, Homo sapiens
auaagacgagcaaaaagcuugu

SEQ ID NO: 998 - RNA, 21 nt, Homo sapiens
cugugcgugugacagcggcug

SEQ ID NO: 999 - RNA, 22 nt, Homo sapiens
uucccuuugucauccuucgccu

SEQ ID NO: 1000 - RNA, 21 nt, Homo sapiens
uaacagucuccagucacggcc

SEQ ID NO: 1001 - RNA, 22 nt, Homo sapiens
accaucgaccguugauuguacc

SEQ ID NO: 1002 - RNA, 21 nt, Homo sapiens
acagcaggcacagacaggcag

SEQ ID NO: 1003 - RNA, 21 nt, Homo sapiens
augaccuaugaauugacagac

SEQ ID NO: 1004 - RNA, 21 nt, Homo sapiens
uaaucucagcuggcaacugug

SEQ ID NO: 1005 - RNA, 24 nt, Homo sapiens
uacugcaucaggaacugauuggau

SEQ ID NO: 1006 - RNA, 21 nt, Homo sapiens
uugugcuugaucuaaccaugu

SEQ ID NO: 1007 - RNA, 21 nt, Homo sapiens
ugauuguccaaacgcaauucu

SEQ ID NO: 1008 - RNA, 21 nt, Homo sapiens
ccacaccguaucugacacuuu

SEQ ID NO: 1009 - RNA, 21 nt, Homo sapiens
ugucaguuugucaaauacccc

SEQ ID NO: 1010 - RNA, 23 nt, Homo sapiens
caagucacuagugguuccguuua

SEQ ID NO: 1011 - RNA, 21 nt, Homo sapiens
agggcccccccucaauccugu

SEQ ID NO: 1012 - RNA, 22 nt, Homo sapiens
ugguuuaccgucccacauacau

SEQ ID NO: 1013 - RNA, 23 nt, Homo sapiens
cagugcaauaguauugucaaagc

SEQ ID NO: 1014 - RNA, 23 nt, Homo sapiens
uaagugcuuccauguuuugguga

SEQ ID NO: 1015 - RNA, 23 nt, Homo sapiens
acuuuaacauggaagugcuuucu

SEQ ID NO: 1016 - RNA, 23 nt, Homo sapiens
uaagugcuuccauguuuuaguag

SEQ ID NO: 1017 - RNA, 22 nt, Homo sapiens
uuuaacauggggguaccugcug

SEQ ID NO: 1018 - RNA, 23 nt, Homo sapiens
uaagugcuuccauguuucagugg

SEQ ID NO: 1019 - RNA, 23 nt, Homo sapiens
uaagugcuuccauguuugagugu

SEQ ID NO: 1020 - RNA, 23 nt, Homo sapiens
aaaagcuggguugagagggcgaa

SEQ ID NO: 1021 - RNA, 21 nt, Homo sapiens
uaagccagggauuguggguuc

SEQ ID NO: 1022 - RNA, 22 nt, Homo sapiens
gcacauuacacggucgaccucu

SEQ ID NO: 1023 - RNA, 23 nt, Homo sapiens
cgcauccccuagggcauuggugu

SEQ ID NO: 1024 - RNA, 22 nt, Homo sapiens
ccacugccccaggugcugcugg

SEQ ID NO: 1025 - RNA, 21 nt, Homo sapiens
ccuaguagguguccaguaagu

SEQ ID NO: 1026 - RNA, 20 nt, Homo sapiens
ccucugggcccuuccuccag

SEQ ID NO: 1027 - RNA, 22 nt, Homo sapiens
cuggcccucucugcccuuccgu

SEQ ID NO: 1028 - RNA, 23 nt, Homo sapiens
gcaaagcacacggccugcagaga

SEQ ID NO: 1029 - RNA, 21 nt, Homo sapiens
gccccugggccuauccuagaa

SEQ ID NO: 1030 - RNA, 23 nt, Homo sapiens
uccagcuccuauaugaugccuuu

SEQ ID NO: 1031 - RNA, 23 nt, Homo sapiens
uccagcaucagugauuuuguuga

SEQ ID NO: 1032 - RNA, 21 nt, Homo sapiens
ucccuguccuccaggagcuca

SEQ ID NO: 1033 - RNA, 23 nt, Homo sapiens
uccgucucaguuacuuuauagcc

SEQ ID NO: 1034 - RNA, 24 nt, Homo sapiens
ucucacacagaaaucgcacccguc

SEQ ID NO: 1035 - RNA, 21 nt, Homo sapiens
ugcugacuccuaguccagggc

SEQ ID NO: 1036 - RNA, 23 nt, Homo sapiens
ugucugcccgcaugccugccucu

SEQ ID NO: 1037 - RNA, 22 nt, Homo sapiens
aauugcacuuuagcaaugguga

SEQ ID NO: 1038 - RNA, 22 nt, Homo sapiens
acauagaggaaauuccacguuu

SEQ ID NO: 1039 - RNA, 21 nt, Homo sapiens
aauaauacaugguugaucuuu

SEQ ID NO: 1040 - RNA, 21 nt, Homo sapiens
gugccgccaucuuuugagugu

SEQ ID NO: 1041 - RNA, 23 nt, Homo sapiens
aaagugcugcgacauuugagcgu

SEQ ID NO: 1042 - RNA, 23 nt, Homo sapiens
gaagugcuucgauuuuggggugu

SEQ ID NO: 1043 - RNA, 22 nt, Homo sapiens
uuauaauacaaccugauaagug

SEQ ID NO: 1044 - DNA, 15 bp, Artificial Sequence
  Synthetic oligonucleotide
ttgtaatacgactca

SEQ ID NO: 1045 - RNA, 22 nt, Artificial Sequence
  Synthetic RNA
gcguaccgacgcguagacggac

SEQ ID NO: 1046 - RNA, 22 nt, Artificial Sequence
  Synthetic RNA
cgcgcgucgcuuuaucuacugu

SEQ ID NO: 1047 - RNA, 22 nt, Artificial Sequence
  Synthetic RNA
uuaucguucgauaagucgcguu

SEQ ID NO: 1048 - RNA, 22 nt, Artificial Sequence
  Synthetic RNA
gaaguuacuauguaggcaaccu

SEQ ID NO: 1049 - RNA, 22 nt, Artificial Sequence
  Synthetic RNA
cgcgggacuaauuguuaccggg

SEQ ID NO: 1050 - RNA, 22 nt, Artificial Sequence
  Synthetic RNA
ucgcgucgaacuccgcaaccga

SEQ ID NO: 1051 - RNA, 22 nt, Artificial Sequence
  Synthetic RNA
accgaacgccguacccaucggg

SEQ ID NO: 1052 - RNA, 22 nt, Artificial Sequence
  Synthetic RNA
cgaggguaacgacucucguguc

SEQ ID NO: 1053 - DNA, 37 bp, Artificial Sequence
  Synthetic probe
ttgtaatacgactcaggccgtctacgcgtcggtacgc

SEQ ID NO: 1054 - DNA, 37 bp, Artificial Sequence
  Synthetic probe
ttgtaatacgactcaacagtagataaagcgacgcgcg

SEQ ID NO: 1055 - DNA, 37 bp, Artificial Sequence
  Synthetic probe
ttgtaatacgactcaaacgcgacttatcgaacgataa

SEQ ID NO: 1056 - DNA, 37 bp, Artificial Sequence
  Synthetic probe
ttgtaatacgactcaaggttgcctacatagtaacttc

SEQ ID NO: 1057 - DNA, 37 bp, Artificial Sequence
  Synthetic probe
ttgtaatacgactcacccggtaacaattagtcccgcg

SEQ ID NO: 1058 - DNA, 37 bp, Artificial Sequence
  Synthetic probe
ttgtaatacgactcatcggttgcggagttcgacgcga

SEQ ID NO: 1059 - DNA, 37 bp, Artificial Sequence
  Synthetic probe
ttgtaatacgactcacccgatgggtacggcgttcggt

SEQ ID NO: 1060 - DNA, 37 bp, Artificial Sequence
  Synthetic probe
ttgtaatacgactcagacacgagagtcgttaccctcg

SEQ ID NO: 1061 - DNA, 37 bp, Artificial Sequence
  Synthetic probe
ttgtaatacgactcacccggtaacaattagacccgcg

SEQ ID NO: 1062 - DNA, 37 bp, Artificial Sequence
  Synthetic probe
ttgtaatacgactcagtccgtctacgcgtcggtacgc

SEQ ID NO: 1063 - DNA, 33 bp, Artificial Sequence
  Synthetic probe
taacaactgcaattgcgccaaacatccctctcc

SEQ ID NO: 1064 - DNA, 35 bp, Artificial Sequence
  Synthetic probe
gttcccttctccacagcctctaaatctcccatccg

SEQ ID NO: 1065 - DNA, 34 bp, Artificial Sequence
  Synthetic probe
tgccggggcgctgttggcggttcctccggggggt

SEQ ID NO: 1066 - DNA, 31 bp, Artificial Sequence
  Synthetic probe
ttaggaaattccatctcacctgctccagtcc

SEQ ID NO: 1067 - DNA, 34 bp, Artificial Sequence
  Synthetic probe
ctctgactccctcactcagtctctctgctccagc

SEQ ID NO: 1068 - DNA, 33 bp, Artificial Sequence
  Synthetic probe
caatgaaccactgaaccactcatgcactgaacc

SEQ ID NO: 1069 - DNA, 33 bp, Artificial Sequence
  Synthetic probe
gtgacagtcagaccctccttgctccaagtcaaa

SEQ ID NO: 1070 - DNA, 30 bp, Artificial Sequence
  Synthetic probe
tcacaaaggatctccttcatccctctccag

SEQ ID NO: 1071 - DNA, 32 bp, Artificial Sequence; identical to SEQ ID NO: 22
  Synthetic probe

SEQ ID NO: 1072 - DNA, 31 bp, Artificial Sequence; identical to SEQ ID NO: 25
  Synthetic probe

SEQ ID NO: 1073 - DNA, 30 bp, Artificial Sequence; identical to SEQ ID NO: 34
  Synthetic probe

SEQ ID NO: 1074 - DNA, 31 bp, Artificial Sequence
  Synthetic probe
gacattcagagcactgggcagaaatcacatg

SEQ ID NO: 1075 - DNA, 30 bp, Artificial Sequence
  Synthetic probe
tctgctccaaaaatccatttaatatattgt

SEQ ID NO: 1076 - DNA, 29 bp, Artificial Sequence
  Synthetic probe
agacgaacacctcctgctgtgcttgattt

SEQ ID NO: 1077 - DNA, 32 bp, Artificial Sequence; identical to SEQ ID NO: 95
  Synthetic probe

SEQ ID NO: 1078 - DNA, 32 bp, Artificial Sequence; identical to SEQ ID NO: 97
  Synthetic probe

SEQ ID NO: 1079 - DNA, 32 bp, Artificial Sequence
  Synthetic probe
aaataatcattccaaatggttctccctgctat

SEQ ID NO: 1080 - DNA, 32 bp, Artificial Sequence
  Synthetic probe
gaacacagtgatgcagaggacttcctgctcca

SEQ ID NO: 1081 - DNA, 31 bp, Artificial Sequence
  Synthetic probe
acttagacttccttcccactccctgcatcct

SEQ ID NO: 1082 - DNA, 22 bp, Artificial Sequence
  Synthetic probe
acatcgttaccagacagtgtta

SEQ ID NO: 1083 - DNA, 22 bp, Artificial Sequence
  Synthetic probe
tcatcattaccaggcagtatta

SEQ ID NO: 1084 - DNA, 23 bp, Artificial Sequence
  Synthetic probe
tccatcattacccggcagtatta

SEQ ID NO: 1085 - DNA, 22 bp, Artificial Sequence
  Synthetic probe
cagactccggtggaatgaagga

SEQ ID NO: 1086 - DNA, 23 bp, Artificial Sequence
  Synthetic probe
ctacctgcactatgagcactttg

SEQ ID NO: 1087 - DNA, 22 bp, Artificial Sequence
  Synthetic probe
tcaacatcagtctgataagcta

SEQ ID NO: 1088 - DNA, 24 bp, Artificial Sequence
  Synthetic probe
tgggagaacctccctgcttctgct

SEQ ID NO: 1089 - DNA, 17 bp, Artificial Sequence
  Synthetic probe
tggaggccccagcgaga

SEQ ID NO: 1090 - DNA, 31 bp, Artificial Sequence
  Synthetic probe
ccctcttcctttctaccccctctctccaccc

SEQ ID NO: 1091 - DNA, 37 bp, Artificial Sequence
  Synthetic probe
accctctccccttggatctggagcagcaggcagtaga

SEQ ID NO: 1092 - DNA, 30 bp, Artificial Sequence
  Synthetic probe
ccactcccctcctttttaattagaaagcac

SEQ ID NO: 1093 - DNA, 40 bp, Artificial Sequence
  Synthetic probe
ctctccactgtctgaatattccatgtgtttgtttccctag

SEQ ID NO: 1094 - DNA, 23 bp, Artificial Sequence
  Synthetic probe
cagcatctccttgctacctcctc

SEQ ID NO: 1095 - DNA, 33 bp, Artificial Sequence
  Synthetic probe
agggggtagcatattcaggactctactttcaaa

SEQ ID NO: 1096 - DNA, 32 bp, Artificial Sequence
  Synthetic probe
atggagggtgggaaactaggctgacatggctc

SEQ ID NO: 1097 - DNA, 35 bp, Artificial Sequence
  Synthetic probe
gcacttgtgttcaggcacccactcctccagcaaag

SEQ ID NO: 1098 - DNA, 40 bp, Artificial Sequence
  Synthetic probe
gccccctgctctggctggtcaaacggaaccaagtccgtct

SEQ ID NO: 1099 - DNA, 35 bp, Artificial Sequence
  Synthetic probe
tcccttctttaattcccttcccctcaattccataa

SEQ ID NO: 1100 - DNA, 32 bp, Artificial Sequence
  Synthetic probe
gagacgccgactggctgagactcaaggcgggg

SEQ ID NO: 1101 - DNA, 35 bp, Artificial Sequence
  Synthetic probe
agggtggtggcggtggtggcgggaacgctgggggg

SEQ ID NO: 1102 - DNA, 29 bp, Artificial Sequence
  Synthetic probe
cattctcctctgcaatccaacaactctac

SEQ ID NO: 1103 - DNA, 33 bp, Artificial Sequence
  Synthetic probe
cgacgaaaatgcaattgtgtgccttctccctcc

SEQ ID NO: 1104 - DNA, 35 bp, Artificial Sequence
  Synthetic probe
ttgtgctccgctctccgggaaatgccatcactaat

SEQ ID NO: 1105 - DNA, 31 bp, Artificial Sequence
  Synthetic probe
tttcctacattgtatggttctcccagctcct

SEQ ID NO: 1106 - DNA, 33 bp, Artificial Sequence
  Synthetic probe
atgccctctctaccacgtcctagacactgagcc

SEQ ID NO: 1107 - DNA, 34 bp, Artificial Sequence
  Synthetic probe
tcaagttttctggcaccttccacccacagaggct

SEQ ID NO: 1108 - DNA, 33 bp, Artificial Sequence
  Synthetic probe
ggacctatgggcccttcccttcccccaacattg

SEQ ID NO: 1109 - DNA, 33 bp, Artificial Sequence
  Synthetic probe
tcttcccctgggtgcatctataacgactacaga

SEQ ID NO: 1110 - DNA, 34 bp, Artificial Sequence
  Synthetic probe
accctctgtgcccccaaattcctagtcccttggt

SEQ ID NO: 1111 - DNA, 35 bp, Artificial Sequence
  Synthetic probe
tccaggtccttccccagtagctagatgaaagaaaa

SEQ ID NO: 1112 - DNA, 30 bp, Artificial Sequence
  Synthetic probe
catacctgcttccctccacccccatctcta

SEQ ID NO: 1113 - DNA, 25 bp, Artificial Sequence
  Synthetic probe
ttcctagataccactcccagctcca

SEQ ID NO: 1114 - DNA, 35 bp, Artificial Sequence
  Synthetic probe
gccttccctaagatcaggctcatcaggcagcccca

SEQ ID NO: 1115 - DNA, 34 bp, Artificial Sequence
  Synthetic probe
ctgtctcctctccccagtccaaaggacctaatgc

SEQ ID NO: 1116 - DNA, 34 bp, Artificial Sequence
  Synthetic probe
agagaaggggtgaggatctccaggggtgactgct

SEQ ID NO: 1117 - DNA, 32 bp, Artificial Sequence
  Synthetic probe
gccctcatttcataagcctgctagacaggaga

SEQ ID NO: 1118 - DNA, 32 bp, Artificial Sequence
  Synthetic probe
ttctgttttttttcttccctctctcccctctt

SEQ ID NO: 1119 - DNA, 33 bp, Artificial Sequence
  Synthetic probe
atatattcctcctttctcctctctggcagctga

SEQ ID NO: 1120 - DNA, 33 bp, Artificial Sequence
  Synthetic probe
ctgcccacttctgggacagccccttccatcttc

SEQ ID NO: 1121 - DNA, 33 bp, Artificial Sequence
  Synthetic probe
cctgggctttctagtctcagctctcctccagct

SEQ ID NO: 1122 - DNA, 35 bp, Artificial Sequence
  Synthetic probe
attccaaatagtctttcccttctactccctttaaa

SEQ ID NO: 1123 - DNA, 33 bp, Artificial Sequence
  Synthetic probe
acgtgccttcctgactgtgagctccttgagagc

SEQ ID NO: 1124 - DNA, 36 bp, Artificial Sequence
  Synthetic probe
ccttctcttctcccgtgctcccaccctccctcaggg

SEQ ID NO: 1125 - DNA, 34 bp, Artificial Sequence
  Synthetic probe
ttacacacagaattatctcccctcctacttaccc

SEQ ID NO: 1126 - DNA, 32 bp, Artificial Sequence
  Synthetic probe
tcccccttgtcttcagctacaatttttctgtg

SEQ ID NO: 1127 - DNA, 33 bp, Artificial Sequence
  Synthetic probe
ccggaacctcagcgctgcatctgtgaaatgggg

SEQ ID NO: 1128 - DNA, 34 bp, Artificial Sequence
  Synthetic probe
agcggaccttctccccacacctccctgcagcctc

SEQ ID NO: 1129 - DNA, 34 bp, Artificial Sequence
  Synthetic probe
caggcctcaccccagtgccctctcctattcccac

SEQ ID NO: 1130 - DNA, 32 bp, Artificial Sequence
  Synthetic probe
tgtggggggagggtggtcagcaggtggggcag

SEQ ID NO: 1131 - DNA, 35 bp, Artificial Sequence
  Synthetic probe
gtaccagctctcagaccctcaccacagcctggggg

SEQ ID NO: 1132 - DNA, 33 bp, Artificial Sequence
  Synthetic probe
ttctctctccctccaccttttgtgccaccactt

SEQ ID NO: 1133 - DNA, 34 bp, Artificial Sequence
  Synthetic probe
tgcccttccttctgttaacaccagccagatcccc

SEQ ID NO: 1134 - DNA, 33 bp, Artificial Sequence
  Synthetic probe
agctcaatgaagcccccagctaggtcatgcctc

SEQ ID NO: 1135 - DNA, 33 bp, Artificial Sequence
  Synthetic probe
caagtggccatcagaccctctttgccccaagtc

SEQ ID NO: 1136 - DNA, 33 bp, Artificial Sequence
  Synthetic probe
tcccaccctctccacctcagggaccagaatcct

SEQ ID NO: 1137 - DNA, 33 bp, Artificial Sequence
  Synthetic probe
tatgtttgcccttctaccacctatcctgataca

SEQ ID NO: 1138 - DNA, 33 bp, Artificial Sequence
  Synthetic probe
ccaagatcttccaggcctctctctccattgagt

SEQ ID NO: 1139 - DNA, 35 bp, Artificial Sequence
  Synthetic probe
ctgcctcacctgagctcccgtgcctgtgcaccctc

SEQ ID NO: 1140 - DNA, 32 bp, Artificial Sequence
  Synthetic probe
gtggaatagtaaggcttcttcccctgcctggc

SEQ ID NO: 1141 - DNA, 33 bp, Artificial Sequence
  Synthetic probe
gcctgtggcgcaagggaggctgtgagtctgggg

SEQ ID NO: 1142 - DNA, 33 bp, Artificial Sequence
  Synthetic probe
acacctgtctctccccagtgcttccgcccctca

SEQ ID NO: 1143 - DNA, 40 bp, Artificial Sequence
  Synthetic probe
cttctccttcctccctgctcccctcccactaatgccaaat

SEQ ID NO: 1144 - DNA, 29 bp, Artificial Sequence
  Synthetic probe
gactgattcaacctctctctcccacttta

SEQ ID NO: 1145 - DNA, 38 bp, Artificial Sequence
  Synthetic probe
actgataattcattagcattcttgaacgtgcccccact

SEQ ID NO: 1146 - DNA, 38 bp, Artificial Sequence
  Synthetic probe
gcccctttctcttctgtcagtatctgagctgatggttg

SEQ ID NO: 1147 - DNA, 35 bp, Artificial Sequence; identical to SEQ ID NO: 17
  Synthetic probe

SEQ ID NO: 1148 - DNA, 29 bp, Artificial Sequence
  Synthetic probe
aataaccctccttccttgatagatttcac

SEQ ID NO: 1149 - DNA, 35 bp, Artificial Sequence
  Synthetic probe
gatcaggtagttaccaggagccatgggggtgtaca

SEQ ID NO: 1150 - DNA, 29 bp, Artificial Sequence
  Synthetic probe
taacctgtctccctcattactagaattct

SEQ ID NO: 1151 - DNA, 29 bp, Artificial Sequence
  Synthetic probe
taacctgtctccctcattactagaattct

SEQ ID NO: 1152 - DNA, 37 bp, Artificial Sequence
  Synthetic probe
gagaattaataaaccatggcatcttctgaaaatgggg

SEQ ID NO: 1153 - DNA, 31 bp, Artificial Sequence
  Synthetic probe
ctcctcctccccgtctttggataccaaacac

SEQ ID NO: 1154 - DNA, 34 bp, Artificial Sequence
  Synthetic probe
ccctctcctcccacaccgtcactcacaataaccc

SEQ ID NO: 1155 - DNA, 30 bp, Artificial Sequence
  Synthetic probe
tcctcctccttcatttgcaggacatcaagg

SEQ ID NO: 1156 - DNA, 40 bp, Artificial Sequence
  Synthetic probe
ccctctccgacagtatctcattacaataattgctaatctc

SEQ ID NO: 1157 - DNA, 34 bp, Artificial Sequence
  Synthetic probe
cctcctcccctttctccagcagtagccttcttaa

SEQ ID NO: 1158 - DNA, 24 bp, Artificial Sequence
  Synthetic probe
tcttgggaaccaagggggctacag

SEQ ID NO: 1159 - DNA, 33 bp, Artificial Sequence; identical to SEQ ID NO: 49
  Synthetic probe

SEQ ID NO: 1160 - DNA, 35 bp, Artificial Sequence
  Synthetic probe
catggtaaacttagatgactcttccccctggattt

SEQ ID NO: 1161 - DNA, 31 bp, Artificial Sequence
  Synthetic probe
caaaattagatttccactttatccttctccc

SEQ ID NO: 1162 - DNA, 37 bp, Artificial Sequence
  Synthetic probe
tctcccctgcagagaggaggaaagcctgcctcggaac

SEQ ID NO: 1163 - DNA, 38 bp, Artificial Sequence
  Synthetic probe
tcaaagaaaaataagtgaaagcatatctcatcatgggg

SEQ ID NO: 1164 - DNA, 35 bp, Artificial Sequence
  Synthetic probe
ccctaattaaagccatcccctcttcccccttcacc

SEQ ID NO: 1165 - DNA, 34 bp, Artificial Sequence; identical to SEQ ID NO: 62
  Synthetic probe

SEQ ID NO: 1166 - DNA, 31 bp, Artificial Sequence; identical to SEQ ID NO: 64
  Synthetic probe

SEQ ID NO: 1167 - DNA, 30 bp, Artificial Sequence
  Synthetic probe
tcatcccaaaataaactcttcctgctcaag

SEQ ID NO: 1168 - DNA, 33 bp, Artificial Sequence
  Synthetic probe
ccctcctttccccacctcagtcgggccactgct

SEQ ID NO: 1169 - DNA, 29 bp, Artificial Sequence
  Synthetic probe
gctccctctctggttggacctcacccaaa

SEQ ID NO: 1170 - DNA, 25 bp, Artificial Sequence
  Synthetic probe
gacacacaattacactcccctggag

SEQ ID NO: 1171 - DNA, 32 bp, Artificial Sequence
  Synthetic probe
aagactctgtcacagtctgtgacccggtgggg

SEQ ID NO: 1172 - DNA, 29 bp, Artificial Sequence
  Synthetic probe
tcttctccccaaccagccagctctcctgg

SEQ ID NO: 1173 - DNA, 30 bp, Artificial Sequence
  Synthetic probe
ttaatccttctctcccctctgatcttgcag

SEQ ID NO: 1174 - DNA, 35 bp, Artificial Sequence
  Synthetic probe
cctagacgccagctgcctgcatgaagcctgcccaa

SEQ ID NO: 1175 - DNA, 33 bp, Artificial Sequence; identical to SEQ ID NO: 96
  Synthetic probe

SEQ ID NO: 1176 - DNA, 35 bp, Artificial Sequence
  Synthetic probe
gaaatatcaagacaaataagatgtttgggggcaca

SEQ ID NO: 1177 - DNA, 27 bp, Artificial Sequence
  Synthetic probe
cagggtatcctctccccacgtgatgcc

SEQ ID NO: 1178 - DNA, 58 bp, Artificial Sequence; identical to SEQ ID NO: 164
  Synthetic probe

SEQ ID NO: 1179 - DNA, 30 bp, Artificial Sequence; identical to SEQ ID NO: 106
  Synthetic probe

SEQ ID NO: 1180 - DNA, 29 bp, Artificial Sequence
  Synthetic probe
atggccacatacatggctggggtgttgaa

SEQ ID NO: 1181 - DNA, 30 bp, Artificial Sequence
  Synthetic probe
ggccaagcttggaacctctccctgccagca

SEQ ID NO: 1182 - DNA, 33 bp, Artificial Sequence
  Synthetic probe
taagcgcaggatgggggtattcaagtccaaagc

SEQ ID NO: 1183 - DNA, 29 bp, Artificial Sequence
  Synthetic probe
gacccctttctcccagcctgtttctgcaa

SEQ ID NO: 1184 - DNA, 28 bp, Artificial Sequence
  Synthetic probe
tggagtaccacctgtttttcccccactt

SEQ ID NO: 1185 - DNA, 33 bp, Artificial Sequence
  Synthetic probe
tgggggctggggcgcaggtcgagagcccagggg

SEQ ID NO: 1186 - DNA, 41 bp, Artificial Sequence
  Synthetic probe
tgctgcactccatcctcccacaatggccccattgttcccag

SEQ ID NO: 1187 - DNA, 24 bp, Artificial Sequence
  Synthetic probe
gtctccctcatccatcatccacca

SEQ ID NO: 1188 - DNA, 46 bp, Artificial Sequence
  Synthetic probe
ctctatatatacctggtatgacttctttggggggaaagaaaagcac

SEQ ID NO: 1189 - DNA, 38 bp, Artificial Sequence
  Synthetic probe
gggaggagtcaggtgtgtgctgtgggttgggggaagac

SEQ ID NO: 1190 - DNA, 54 bp, Artificial Sequence; identical to SEQ ID NO: 161
  Synthetic probe

SEQ ID NO: 1191 - DNA, 23 bp, Artificial Sequence
  Synthetic probe
tcatagccctgtacaatgctgct

SEQ ID NO: 1192 - DNA, 21 bp, Artificial Sequence
  Synthetic probe
ctcccccactgcagctggcac

SEQ ID NO: 1193 - DNA, 22 bp, Artificial Sequence
  Synthetic probe
tgaagaagggggggaagggcgt

SEQ ID NO: 1194 - DNA, 17 bp, Artificial Sequence
  Synthetic probe
gacagcctctcccccac

SEQ ID NO: 1195 - DNA, 22 bp, Artificial Sequence
  Synthetic probe
atgctttttggggtaagggctt

SEQ ID NO: 1196 - DNA, 18 bp, Artificial Sequence
  Synthetic probe
atcacattcacctccctg

SEQ ID NO: 1197 - DNA, 22 bp, Artificial Sequence
  Synthetic probe
agaaaatgcccctcagttttga

SEQ ID NO: 1198 - DNA, 22 bp, Artificial Sequence
  Synthetic probe
ccatctttaccagacagtgtta

SEQ ID NO: 1199 - DNA, 21 bp, Artificial Sequence
  Synthetic probe
gagctacagtgcttcatctca

SEQ ID NO: 1200 - DNA, 24 bp, Artificial Sequence
  Synthetic probe
agtgtgagttctaccattgccaaa

SEQ ID NO: 1201 - DNA, 22 bp, Artificial Sequence
  Synthetic probe
agtgaattctaccagtgccata

SEQ ID NO: 1202 - DNA, 22 bp, Artificial Sequence
  Synthetic probe
gaacctatctcccctctggacc

SEQ ID NO: 1203 - DNA, 23 bp, Artificial Sequence
  Synthetic probe
tcagttttgcatagatttgcaca

SEQ ID NO: 1204 - DNA, 22 bp, Artificial Sequence
  Synthetic probe
ggagtaaacaaccctctcccag

SEQ ID NO: 1205 - DNA, 22 bp, Artificial Sequence
  Synthetic probe
tcacgcgagccgaacgaacaaa

SEQ ID NO: 1206 - DNA, 21 bp, Artificial Sequence
  Synthetic probe
acgtggaatttcctctatgtt

SEQ ID NO: 1207 - DNA, 22 bp, Artificial Sequence
  Synthetic probe
acggttttaccagacagtatta

SEQ ID NO: 1208 - DNA, 22 bp, Artificial Sequence
  Synthetic probe
ctcccttctttcctcccgtctt

SEQ ID NO: 1209 - DNA, 23 bp, Artificial Sequence
  Synthetic probe
gaaagtgcttctttcctcgagaa

SEQ ID NO: 1210 - DNA, 23 bp, Artificial Sequence
  Synthetic probe
acaacaaaatcactagtcttcca

SEQ ID NO: 1211 - DNA, 76 bp, Homo sapiens
  misc_feature (1)..(76): Pre-microRNA sequence
gggtggagagagggggtagaaaggaagagggacatatgggagcctcttcccccatgcccgaaagcttctcccattt

SEQ ID NO: 1212 - DNA, 85 bp, Homo sapiens
  misc_feature (1)..(85): Pre-microRNA sequence
accttctgcctttgagacctggaagccacagcactggtggacataaattctactgcctgctgctccagatccaaggggagagggt

SEQ ID NO: 1213 - DNA, 85 bp, Homo sapiens; identical to SEQ ID NO: 537
  misc_feature (1)..(85): Pre-microRNA sequence

SEQ ID NO: 1214 - DNA, 81 bp, Homo sapiens
  misc_feature (1)..(81): Pre-microRNA sequence
ctctctcttgctgaactctgtgtccagggttctctagccctctagggaaacaaacacatggaatattcagacagtggagag

SEQ ID NO: 1215 - DNA, 84 bp, Homo sapiens
  misc_feature (1)..(84): Pre-microRNA sequence
ggagagggatgtttggcgcaattgcagttgttaaaatagaacaggcttctgaattgtggccagaacataatgaatcccatttct

SEQ ID NO: 1216 - DNA, 87 bp, Homo sapiens
  misc_feature (1)..(87): Pre-microRNA sequence
agtccacagagaaggctggaggaggtagcaaggagatgctgtaacagctgctacagccttaaaacaaagttggtgtctctctggact

SEQ ID NO: 1217 - DNA, 76 bp, Homo sapiens
  misc_feature (1)..(76): Pre-microRNA sequence
gggtgggtggcagatgtcttactctgccttttagaaacacatgtttgaaagtagagtcctgaatatgctaccccct

SEQ ID NO: 1218 - DNA, 82 bp, Homo sapiens
  misc_feature (1)..(82): Pre-microRNA sequence
gtgagagggtaaagtagtatgctgtgggtcagaattactagggaagttctgagccatgtcagcctagtttcccaccctccat

SEQ ID NO: 1219 - DNA, 110 bp, Homo sapiens
  misc_feature (1)..(110): Pre-microRNA sequence
gaatagttggaaggtcacctttgctggaggagtgggtgcctgaacacaagtgcagtcctattagtaagccaggaccttcagctcctcagttgaaagggaaataactattc

SEQ ID NO: 1220 - DNA, 87 bp, Homo sapiens
  misc_feature (1)..(87): Pre-microRNA sequence
tgccagccctgctgtagctggttgaaggggaccaaacctctcaggaagacggacttggttccgtttgaccagccagagcagggggca

SEQ ID NO: 1221 - DNA, 122 bp, Homo sapiens
  misc_feature (1)..(122): Pre-microRNA sequence
ggccctgtgcataataaatctttatggaattgaggggaagggaattaaagaagggaagagaagagcaaacccactacagagtttatgaccatctattcttaatattatattagaactgggcc

SEQ ID NO: 1222 - DNA, 121 bp, Homo sapiens
  misc_feature (1)..(121): Pre-microRNA sequence
cgcccactaaaccggatgtgacgttgacctaccttagtcacattgttagggaaggaagtgtgccgcgcctacctatctgccccgccttgagtctcagccagtcggcgtctccatcctggcg

SEQ ID NO: 1223 - DNA, 113 bp, Homo sapiens; identical to SEQ ID NO: 549
  misc_feature (1)..(113): Pre-microRNA sequence

SEQ ID NO: 1224 - DNA, 64 bp, Homo sapiens
  misc_feature (1)..(64): Pre-microRNA sequence
gattgtagagttgttggattgcagaggagaatgttcgattcatcttttcagtaactttaaaatc

SEQ ID NO: 1225 - DNA, 148 bp, Homo sapiens; identical to SEQ ID NO: 558
  misc_feature (1)..(148): Pre-microRNA sequence

SEQ ID NO: 1226 - DNA, 107 bp, Homo sapiens; identical to SEQ ID NO: 559
  misc_feature (1)..(107): Pre-microRNA sequence

SEQ ID NO: 1227 - DNA, 77 bp, Homo sapiens
  misc_feature (1)..(77): Pre-microRNA sequence
tcctccaggagctgggagaaccatacaatgtaggaaaaatatagtttaattgaatggtactctggtcttctggagga

SEQ ID NO: 1228 - DNA, 108 bp, Homo sapiens
  misc_feature (1)..(108): Pre-microRNA sequence
ggctcagtgtctaggacgtggtagagagggcatgagcacagtggaagcaaaaatgccagttcagtgcttagtgctgactttaccaccgttcttcatggcaactgaact

SEQ ID NO: 1229 - DNA, 106 bp, Homo sapiens
  misc_feature (1)..(106): Pre-microRNA sequence
cccacctacagcctctgtgggtggaaggtgccagaaaacttgaagagtggctctggccagctctctgggcccagttggcaccaggtggttgcagagaaagggtggg

SEQ ID NO: 1230 - DNA, 113 bp, Homo sapiens
  misc_feature (1)..(113): Pre-microRNA sequence
ggacctgggggcttctctgacccttgaacagcttatactatgagaccttgggaacctcctccatgcagacacacaaggctcaatgttgggggaagggaagggcccataggtcc

SEQ ID NO: 1231 - DNA, 124 bp, Homo sapiens
  misc_feature (1)..(124): Pre-microRNA sequence
gccttgtctgaagggagaggccctggcatgcggatgggagatttagaggctgtggagaagggaacttggggctttccttccttcgtggcctcactcccctggggcctctctctatggagggggc

SEQ ID NO: 1232 - DNA, 102 bp, Homo sapiens
  misc_feature (1)..(102): Pre-microRNA sequence
gttagggcctggaatccctctgtcgggcatctgttagagtctgtggatggcactctgtagtcgttatagatgcacccaggggaagattctctcaggcatgat

SEQ ID NO: 1233 - DNA, 96 bp, Homo sapiens
  misc_feature (1)..(96): Pre-microRNA sequence
attctctgcatgtttaccttgttctctctgttgttttggtgttaaaagttaaataactctgaaccaagggactaggaatttgggggcacagagggt

SEQ ID NO: 1234 - DNA, 102 bp, Homo sapiens
  misc_feature (1)..(102): Pre-microRNA sequence
tttgggtcctttgtccagagtgtgaggatgttggtgaaggccatgccctgactagattcagggatccttttctttcatctagctactggggaaggacctgga

SEQ ID NO: 1235 - DNA, 81 bp, Homo sapiens
  misc_feature (1)..(81): Pre-microRNA sequence
tagagatgggggtggagggaagcaggtatgatttcaggggcagcaggagattctcttctgtttccctctctcccagctcta

SEQ ID NO: 1236 - DNA, 58 bp, Homo sapiens
  misc_feature (1)..(58): Pre-microRNA sequence
tggagctgggagtggtatctaggaatttctccttctagtttttaccttcttagtttta

SEQ ID NO: 1237 - DNA, 100 bp, Homo sapiens
  misc_feature (1)..(100): Pre-microRNA sequence
acccatctgtaaagtgggacaatcttcttgcctcctaggatggccatggagctcagtgcaggggttggggctgcctgatgagcctgatcttagggaaggc

SEQ ID NO: 1238 - DNA, 121 bp, Homo sapiens
  misc_feature (1)..(121): Pre-microRNA sequence
ctgctctccttgacctggtaggaaggtgatttgatggttttcaaacacatgctgtttctctctttcatcagggtagctgggtgggtggcattaggtcctttggactggggagaggagacag

SEQ ID NO: 1239 - DNA, 111 bp, Homo sapiens
  misc_feature (1)..(111): Pre-microRNA sequence
tacatgtgccgagatgtgagcagtcacccctggagatcctcaccccttctctgtagaacgaggagttgggctgccagggattggggtctgggcgcgttgctggtgtgtgtg

SEQ ID NO: 1240 - DNA, 64 bp, Homo sapiens
  misc_feature (1)..(64): Pre-microRNA sequence
tctcctgtctagcaggcttatgaaatgagggcccatcctttggtcaaggcttgtttgaaggaga

SEQ ID NO: 1241 - DNA, 79 bp, Homo sapiens
  misc_feature (1)..(79): Pre-microRNA sequence
accccccggaggaaccgccaacagcgccccggcaccatcaagcatggatcggcgctggacgtgctcctctccatggggt

SEQ ID NO: 1242 - DNA, 81 bp, Homo sapiens
  misc_feature (1)..(81): Pre-microRNA sequence
ggactggagcaggtgagatggaatttcctaaaggtccagatatttaggaccctggacccatctcacccgctgcctctgtcc

SEQ ID NO: 1243 - DNA, 100 bp, Homo sapiens
  misc_feature (1)..(100): Pre-microRNA sequence
ggggaagaagagcaaagaggggagagagggaagaaaaaaaacagaataagttggtcgtattgaagcttctccatcaaccctagaacaattagcttccacc

SEQ ID NO: 1244 - DNA, 119 bp, Homo sapiens
  misc_feature (1)..(119): Pre-microRNA sequence
tgagtaaataatcttcaaatgtatggctttttattcctggtgagagcatcatactgagagaaacagtgcttcagctgccagagaggagaaaggaggaatatatagaaacatccaaactt

SEQ ID NO: 1245 - DNA, 121 bp, Homo sapiens
  misc_feature (1)..(121): Pre-microRNA sequence
gctggagcagagagactgagtgagggagtcagagagttaagagaattagtacaggtgagattgtactgattatcttaactctctgaccccctcactcagtaaagatcagattgtgccaggc

SEQ ID NO: 1246 - DNA, 119 bp, Homo sapiens
  misc_feature (1)..(119): Pre-microRNA sequence
gaagatggaaggggctgtcccagaagtgggcaggaagaaccaggctgttatgccatgtgggcatgtggcacaacagcctcgttcttcctgcccacttctggggcaccttgtttccctct

SEQ ID NO: 1247 - DNA, 115 bp, Homo sapiens
  misc_feature (1)..(115): Pre-microRNA sequence
ctttctgcttggctgttatatgaacctgccctgggctttctagtctcagctctcctgaccagctgagctggaggagagctgagactagaaagcccagggcaggtccaactgaaaa

SEQ ID NO: 1248 - DNA, 113 bp, Homo sapiens
  misc_feature (1)..(113): Pre-microRNA sequence
aagacattactttgaatatattttaaagggagtagaagggaaagactatttggaatgctttattaaaatagtctttcccttctactccttttaaaatatattcaaagaaagtt

SEQ ID NO: 1249 - DNA, 121 bp, Homo sapiens
  misc_feature (1)..(121): Pre-microRNA sequence
ctttggcacagtccgtgctctcaaggagctcacagtcaggaaggcacgtggaatttcagcctggagttccaagtgctgccctcagggagtgctgggcctgagctggggtgaggctgcaggg

SEQ ID NO: 1250 - DNA, 118 bp, Homo sapiens
  misc_feature (1)..(118): Pre-microRNA sequence
ctcacacatggtacgttttcaatgagctgattttgtttctccactcaatgcagtaattgagcttctttggttcagtgcatgagtggttcagtggttcattgggcatcctggttgaggg

SEQ ID NO: 1251 - DNA, 121 bp, Homo sapiens
  misc_feature (1)..(121): Pre-microRNA sequence
aggtggtggtggggaggaccctgagggagggtgggagcacgggagaagagaaggcatacccaacctgacctacttacctgtcccctaccccacagagggcttccctggaggccgccattgc

SEQ ID NO: 1252 - DNA, 115 bp, Homo sapiens
  misc_feature (1)..(115): Pre-microRNA sequence
gggtaagtaggaggggagataattctgtgtgtaactcacaacccttctgcccttttatctctggggcccgaatttccatgtgggggataaaagaagtcacccttcctcatccccc

SEQ ID NO: 1253 - DNA, 71 bp, Homo sapiens
  misc_feature (1)..(71): Pre-microRNA sequence
atagatttacactccctgtcctccacaagctcacagaaaaattgtagctgaagacaagggggaagaaccta

SEQ ID NO: 1254 - DNA, 104 bp, Homo sapiens
  misc_feature (1)..(104): Pre-microRNA sequence
cactttttatgacatcacattgttgacctcaatctgaggagatgggggagctagccccatttcacagatgcagcgctgaggttccgggatgtgaggtgaggtga

SEQ ID NO: 1255 - DNA, 117 bp, Homo sapiens
  misc_feature (1)..(117): Pre-microRNA sequence
tcagggtttggtgtacaattgtgggaggctgcagggaggtgtggggagaaggtccgctttagagcttggtccctctgtgctcacctcccagccccaagcccccagcaccggatcctg

SEQ ID NO: 1256 - DNA, 99 bp, Homo sapiens
  misc_feature (1)..(99): Pre-microRNA sequence
gggccggtgaaggccccgcctgggtcccatacccggggttgggggtcagaagccgctcggtctctgtgggaataggagagggcactggggtgaggcctg

SEQ ID NO: 1257 - DNA, 115 bp, Homo sapiens
  misc_feature (1)..(115): Pre-microRNA sequence
tccctgcacccctgcctgtacaggtgagtgggagccggtggggctggagtaagggcacgcccggggctgccccacctgctgaccaccctccccccacagcaccctgtgccggggc

SEQ ID NO: 1258 - DNA, 117 bp, Homo sapiens
  misc_feature (1)..(117): Pre-microRNA sequence
accctctcaggacccctcctaaggggtaggcaggggctggggtttcaggttctcagtcagaaccttggcccctctccccagacccccaggctgtggtgagggtctgagagctggtac

SEQ ID NO: 1259 - DNA, 110 bp, Homo sapiens
  misc_feature (1)..(110): Pre-microRNA sequence
atcctcattcattcacaggagacctaccgcagaagagaccctagaacatccttggttcaaagtgagtctagtctgcaaagtggtggcacaaaaggtggagggagagagaa

SEQ ID NO: 1260 - DNA, 116 bp, Homo sapiens
  misc_feature (1)..(116): Pre-microRNA sequence
ccatgattcctttaacaacatgtttccagcattcccaggtaggccaaggtgtcctacagaaaaaccttgggttagacctacaggggatctggctggtgttaacagaaggaagggca

SEQ ID NO: 1261 - DNA, 121 bp, Homo sapiens
  misc_feature (1)..(121): Pre-microRNA sequence
gaggcatgacctagctgggggcttcattgagctgtggtcaccggagctcagaggctgctcctcctaggcaccctagctcttaggactcagttctctgaagctcaccaagggcatctatctt

SEQ ID NO: 1262 - DNA, 88 bp, Homo sapiens
  misc_feature (1)..(88): Pre-microRNA sequence
tttgacttggagcaaggagggtctgactgtcacttggagctaaaccagtctccaagtggccatcagaccctctttgccccaagtcagt

SEQ ID NO: 1263 - DNA, 84 bp, Homo sapiens
  misc_feature (1)..(84): Pre-microRNA sequence
gacttggggcaaagagggtctgatggccacttggagactggtttagctccaagtgacagtcagaccctccttgctccaagtcaa

SEQ ID NO: 1264 - DNA, 111 bp, Homo sapiens
  misc_feature (1)..(111): Pre-microRNA sequence
ggtcagtctagcttgctcttgaagctctccagagacaaagaagcctgtagcaaatcacaatgaggattctggtccctgaggtggagagggtgggagccccactgtttgccc

SEQ ID NO: 1265 - DNA, 110 bp, Homo sapiens
  misc_feature (1)..(110): Pre-microRNA sequence
tatatagagagacatatgtatcaggataggtggtagaagggcaaacatagaaaacaccaccctagccaggttgccctgaatggccccagtgtctagcatagtgctttatg

SEQ ID NO: 1266 - DNA, 98 bp, Homo sapiens
  misc_feature (1)..(98): Pre-microRNA sequence
ctggtgtggacctcactcaatggagagagaggcctggaagatcttggaacaggaacatccagccctgcttctctcttaatctcagcccacactcagag

SEQ ID NO: 1267 - DNA, 119 bp, Homo sapiens
  misc_feature (1)..(119): Pre-microRNA sequence
agtgcagtggtgtgatcatagccaatagagggtgcacaggcacgggagctcaggtgaggcagggagctgagctcacctgacctcccatgcctgtgcaccctctattatatcactcgtat

SEQ ID NO: 1268 - DNA, 96 bp, Homo sapiens
  misc_feature (1)..(96): Pre-microRNA sequence
ggccatagctgctgggtccctaaggcacctctcatcagttaggtcaatgtgccaggcaggggaagaagccttactattccactgcatctgtggcct

SEQ ID NO: 1269 - DNA, 121 bp, Homo sapiens
  misc_feature (1)..(121): Pre-microRNA sequence
ccccagactcacagcctcccttgcgccacaggcctgtgtcctgactgggactcttgggacgccagcaagcccgttaccaatgcgcgagaggccatgcagcaggcggatgactggctgggca

SEQ ID NO: 1270 - DNA, 95 bp, Homo sapiens
  misc_feature (1)..(95): Pre-microRNA sequence
tgaggggcggaagcactggggagagacaggtgtgagcttcccacgtggtgatcagctcacacctgtcttgtgttcttggtattcacagactctca

SEQ ID NO: 1271 - DNA, 83 bp, Homo sapiens
  misc_feature (1)..(83): Pre-microRNA sequence
cttctcttattctccctgttttcatcctacttttaagtaataaatttggcattagtgggaggggagcagggaggaaggagaag

SEQ ID NO: 1272 - DNA, 72 bp, Homo sapiens; identical to SEQ ID NO: 406
  misc_feature (1)..(72): Pre-microRNA sequence

SEQ ID NO: 1273 - DNA, 77 bp, Homo sapiens; identical to SEQ ID NO: 408
  misc_feature (1)..(77): Pre-microRNA sequence

SEQ ID NO: 1274 - DNA, 83 bp, Homo sapiens
  misc_feature (1)..(83): Pre-microRNA sequence
agtgggggcacgttcaagaatgctaatgaattatcagttttctttaagcctcattagatttcttgatagcaaaacctcccatt

SEQ ID NO: 1275 - DNA, 78 bp, Homo sapiens
  misc_feature (1)..(78): Pre-microRNA sequence
gtctctggcttctgtttcttatgctgctgttgattttttccaaccatcagctcagatactgacagaagagaaaggggc

SEQ ID NO: 1276 - DNA, 83 bp, Homo sapiens; identical to SEQ ID NO: 414
  misc_feature (1)..(83): Pre-microRNA sequence

SEQ ID NO: 1277 - DNA, 73 bp, Homo sapiens
  misc_feature (1)..(73): Pre-microRNA sequence
gtaaatttcaacctatttttaagggttattttcactcaagtgaaatctatcaaggaaggagggttatttttac

SEQ ID NO: 1278 - DNA, 79 bp, Homo sapiens
  misc_feature (1)..(79): Pre-microRNA sequence
ggttaaaatggattgccaggaaacacctgaagggtacaaagtcatgtacacccccatggctcctggtaactacctgatc

SEQ ID NO: 1279 - DNA, 80 bp, Homo sapiens
  misc_feature (1)..(80): Pre-microRNA sequence
catgtgatttctgcccagtgctctgaatgtcaaagtgaagaaattcaatgaagcacgggtaaacggcgggagtaactatg

SEQ ID NO: 1280 - DNA, 84 bp, Homo sapiens; identical to SEQ ID NO: 419
  misc_feature (1)..(84): Pre-microRNA sequence

SEQ ID NO: 1281 - DNA, 77 bp, Homo sapiens; identical to SEQ ID NO: 421
  misc_feature (1)..(77): Pre-microRNA sequence

SEQ ID NO: 1282 - DNA, 72 bp, Homo sapiens; identical to SEQ ID NO: 424
  misc_feature (1)..(72): Pre-microRNA sequence

SEQ ID NO: 1283 - DNA, 77 bp, Homo sapiens
  misc_feature (1)..(77): Pre-microRNA sequence
ccccattttcagaagatgccatggtttattaattctctgcagaagcaataagaactgggtattggcttaatttgggg

SEQ ID NO: 1284 - DNA, 73 bp, Homo sapiens; identical to SEQ ID NO: 428
  misc_feature (1)..(73): Pre-microRNA sequence

SEQ ID NO: 1285 - DNA, 73 bp, Homo sapiens; identical to SEQ ID NO: 430
  misc_feature (1)..(73): Pre-microRNA sequence

SEQ ID NO: 1286 - DNA, 88 bp, Homo sapiens
  misc_feature (1)..(88): Pre-microRNA sequence
ccaatgcctctcacctcctcacttgtggcaccttcgcttttgatccgaagtgcggggttattgtgagtgacggtgtgggaggagaggg

SEQ ID NO: 1287 - DNA, 78 bp, Homo sapiens
  misc_feature (1)..(78): Pre-microRNA sequence
ggagcccttgatgtcctgcaaatgaaggaggaggatgtccttaagttccttgcagcaggaacccacttaggtggcacc

SEQ ID NO: 1288 - DNA, 82 bp, Homo sapiens
  misc_feature (1)..(82): Pre-microRNA sequence
ctctctctctcagttactcacaaaacatggctgtcttattcagagattagcaattattgtaatgagatactgtcggagaggg

SEQ ID NO: 1289 - DNA, 72 bp, Homo sapiens
  misc_feature (1)..(72): Pre-microRNA sequence
cctctgcctggctttctttgtaaagccattaaactacattaagaaggctactgctggagaaaggggaggagg

SEQ ID NO: 1290 - DNA, 89 bp, Homo sapiens; identical to SEQ ID NO: 440
  misc_feature (1)..(89): Pre-microRNA sequence

SEQ ID NO: 1291 - DNA, 87 bp, Homo sapiens
  misc_feature (1)..(87): Pre-microRNA sequence
ggccacttgggtgcattggacttgaacttcttttttgtctcccctttaggggggatatagattttcatttctctttcataacgggcc

SEQ ID NO: 1292 - DNA, 83 bp, Homo sapiens; identical to SEQ ID NO: 445
  misc_feature (1)..(83): Pre-microRNA sequence

SEQ ID NO: 1293 - DNA, 88 bp, Homo sapiens
  misc_feature (1)..(88): Pre-microRNA sequence
aaatccagggggaagagtcatctaagtttaccatgcagttgtttaccaaaaatagaggaggagagtcttaacttttgctcttggattt

SEQ ID NO: 1294 - DNA, 80 bp, Homo sapiens; identical to SEQ ID NO: 1279
  misc_feature (1)..(80): Pre-microRNA sequence

SEQ ID NO: 1295 - DNA, 77 bp, Homo sapiens; identical to SEQ ID NO: 449
  misc_feature (1)..(77): Pre-microRNA sequence

SEQ ID NO: 1296 - DNA, 74 bp, Homo sapiens; identical to SEQ ID NO: 450
  misc_feature (1)..(74): Pre-microRNA sequence

SEQ ID NO: 1297 - DNA, 77 bp, Homo sapiens
  misc_feature (1)..(77): Pre-microRNA sequence
gttccgaggcaggctttcctcctctctgcaggggagaggctccctcacacaagaggaggattacactggctctgagc

SEQ ID NO: 1298 - DNA, 81 bp, Homo sapiens
  misc_feature (1)..(81): Pre-microRNA sequence
tcaaatgagaaactaagtacatttcttttcaacaggcaatttaccccatgatgagatatgctttcacttatttttctttga

SEQ ID NO: 1299 - DNA, 109 bp, Homo sapiens
  misc_feature (1)..(109): Pre-microRNA sequence
ggtgaagggggaagaggggatggctttaattagggcttcttggcctcgtcagtcctggggttggtcggggtaatccagttagagtcccagcctttcatctcagctggcc

SEQ ID NO: 1300 - DNA, 87 bp, Homo sapiens; identical to SEQ ID NO: 458
  misc_feature (1)..(87): Pre-microRNA sequence

SEQ ID NO: 1301 - DNA, 81 bp, Homo sapiens; identical to SEQ ID NO: 460
  misc_feature (1)..(81): Pre-microRNA sequence

SEQ ID NO: 1302 - DNA, 78 bp, Homo sapiens; identical to SEQ ID NO: 461
  misc_feature (1)..(78): Pre-microRNA sequence

SEQ ID NO: 1303 - DNA, 87 bp, Homo sapiens; identical to SEQ ID NO: 462
  misc_feature (1)..(87): Pre-microRNA sequence

SEQ ID NO: 1304 - DNA, 74 bp, Homo sapiens; identical to SEQ ID NO: 464
  misc_feature (1)..(74): Pre-microRNA sequence

SEQ ID NO: 1305 - DNA, 110 bp, Homo sapiens
  misc_feature (1)..(110): Pre-microRNA sequence
atctgtgtttggctacaggtgggcactctaaggggtcagtctccaggggagtgtaattgtgtgtctcctggggcttgtttgcagaatgacctaaagctgaagccccagct

SEQ ID NO: 1306 - DNA, 88 bp, Homo sapiens
  misc_feature (1)..(88): Pre-microRNA sequence
ccccaccgggtcacagactgtgacagagtcttattgcctgtctctgggaattcattttctgtctctcctctgttccacctctctgggg

SEQ ID NO: 1307 - DNA, 73 bp, Homo sapiens; identical to SEQ ID NO: 467
  misc_feature (1)..(73): Pre-microRNA sequence

SEQ ID NO: 1308 - DNA, 73 bp, Homo sapiens; identical to SEQ ID NO: 468
  misc_feature (1)..(73): Pre-microRNA sequence

SEQ ID NO: 1309 - DNA, 79 bp, Homo sapiens; identical to SEQ ID NO: 483
  misc_feature (1)..(79): Pre-microRNA sequence

SEQ ID NO: 1310 - DNA, 84 bp, Homo sapiens
  misc_feature (1)..(84): Pre-microRNA sequence
gtggcgattgggcaggcttcatgcaggcagctggcgtctagggctgtcagacgcaatcagtgtttgcatggcacctgcggccac

SEQ ID NO: 1311 - DNA, 86 bp, Homo sapiens; identical to SEQ ID NO: 490
  misc_feature (1)..(86): Pre-microRNA sequence

SEQ ID NO: 1312 - DNA, 88 bp, Homo sapiens; identical to SEQ ID NO: 491
  misc_feature (1)..(88): Pre-microRNA sequence

SEQ ID NO: 1313 - DNA, 89 bp, Homo sapiens
  misc_feature (1)..(89): Pre-microRNA sequence
catcccatggtgtgcccccaaacatcttatttgtcttgatatttctttcacagaaatacatatgacagataaggagtcactagaggatg

SEQ ID NO: 1314 - DNA, 79 bp, Homo sapiens; identical to SEQ ID NO: 492
  misc_feature (1)..(79): Pre-microRNA sequence

SEQ ID NO: 1315 - DNA, 73 bp, Homo sapiens; identical to SEQ ID NO: 499
  misc_feature (1)..(73): Pre-microRNA sequence

SEQ ID NO: 1316 - DNA, 98 bp, Homo sapiens; identical to SEQ ID NO: 400
  misc_feature (1)..(98): Pre-microRNA sequence

SEQ ID NO: 1317 - DNA, 148 bp, Homo sapiens; identical to SEQ ID NO: 558
  misc_feature (1)..(148): Pre-microRNA sequence

SEQ ID NO: 1318 - DNA, 75 bp, Homo sapiens; identical to SEQ ID NO: 501
  misc_feature (1)..(75): Pre-microRNA sequence

SEQ ID NO: 1319 - DNA, 83 bp, Homo sapiens
  misc_feature (1)..(83): Pre-microRNA sequence
ttcaacaccccagccatgtatgtggccatccaggccttgctgtccctgtaagcctctggccataccactggcatcgtgatgga

SEQ ID NO: 1320 - DNA, 85 bp, Homo sapiens; identical to SEQ ID NO: 504
  misc_feature (1)..(85): Pre-microRNA sequence

SEQ ID NO: 1321 - DNA, 75 bp, Homo sapiens
  misc_feature (1)..(75): Pre-microRNA sequence
taaggcaggatgattcgggaaatggactatttaaagcaagctgctttggacttgaatacccccatcctgcgctta

SEQ ID NO: 1322 - DNA, 73 bp, Homo sapiens; identical to SEQ ID NO: 506
  misc_feature (1)..(73): Pre-microRNA sequence

SEQ ID NO: 1323 - DNA, 66 bp, Homo sapiens
  misc_feature (1)..(66): Pre-microRNA sequence
ttctgagatatgatctgttggattctctactaccaaagtgggggaaaaacaggtggtactccagaa

SEQ ID NO: 1324 - DNA, 90 bp, Homo sapiens
  misc_feature (1)..(90): Pre-microRNA sequence
cccctgggctctcgacctgcgccccagcccccagtacctcgtccggagcactgtgagggagctgcagcaggactcaaggcagcccagggg

SEQ ID NO: 1325 - DNA, 85 bp, Homo sapiens; identical to SEQ ID NO: 516
  misc_feature (1)..(85): Pre-microRNA sequence

SEQ ID NO: 1326 - DNA, 85 bp, Homo sapiens
  misc_feature (1)..(85): Pre-microRNA sequence
ctgggaacaatggggccattgtgggaggatggagtgcagcagactgctggcacagccaagcgcaccacggtgggacctcacccag

SEQ ID NO: 1327 - DNA, 87 bp, Homo sapiens; identical to SEQ ID NO: 519
  misc_feature (1)..(87): Pre-microRNA sequence

SEQ ID NO: 1328 - DNA, 84 bp, Homo sapiens; identical to SEQ ID NO: 521
  misc_feature (1)..(84): Pre-microRNA sequence

SEQ ID NO: 1329 - DNA, 84 bp, Homo sapiens; identical to SEQ ID NO: 640
  misc_feature (1)..(84): Pre-microRNA sequence

SEQ ID NO: 1330 - DNA, 87 bp, Homo sapiens
  misc_feature (1)..(87): Pre-microRNA sequence
gtcttcccccaacccacagcacacacctgactcctcccttccagggaaaagacctcagggctgctggtgagtcagaaataggaagac

SEQ ID NO: 1331 - DNA, 78 bp, Homo sapiens; identical to SEQ ID NO: 755
  misc_feature (1)..(78): Pre-microRNA sequence

SEQ ID NO: 1332 - DNA, 78 bp, Homo sapiens; identical to SEQ ID NO: 754
  misc_feature (1)..(78): Pre-microRNA sequence

SEQ ID NO: 1333 - DNA, 83 bp, Homo sapiens
  misc_feature (1)..(83): Pre-microRNA sequence
cctgctgcagaggtgccagctgcagtgggggaggcactgccagggctgcccactctgcttagccagcaggtgccaagaacagg

SEQ ID NO: 1334 - DNA, 66 bp, Homo sapiens
  misc_feature (1)..(66): Pre-microRNA sequence
gggaggagggaggagatgggccaagttccctctggctggaacgcccttcccccccttcttcacctg

SEQ ID NO: 1335 - DNA, 80 bp, Homo sapiens
  misc_feature (1)..(80): Pre-microRNA sequence
cctctgtgagaaagggtgtgggggagaggctgtcttgtgtctgtaagtatgccaaacttattttccccaaggcagaggga

SEQ ID NO: 1336 - DNA, 90 bp, Homo sapiens
  misc_feature (1)..(90): Pre-microRNA sequence
tgcccttcgcgaatctttttgcggtctgggcttgctgtacataactcaatagccggaagcccttaccccaaaaagcatttgcggagggcg

SEQ ID NO: 1337 - DNA, 79 bp, Homo sapiens
  misc_feature (1)..(79): Pre-microRNA sequence
acattatgaagcaagtattattatccctgttttacaaataaggaaataaactcagggaggtgaatgtgatcaaagatag

SEQ ID NO: 1338 - DNA, 73 bp, Homo sapiens
  misc_feature (1)..(73): Pre-microRNA sequence
actgaggtcctcaaaactgaggggcattttctgtggtttgaaaggaaagtgcacccagttttggggatgtcaa

SEQ ID NO: 1339 - DNA, 95 bp, Homo sapiens
  misc_feature (1)..(95): Pre-microRNA sequence
cggccggccctgggtccatcttccagtacagtgttggatggtctaattgtgaagctcctaacactgtctggtaaagatggctcccgggtgggttc

SEQ ID NO: 1340 - DNA, 106 bp, Homo sapiens
  misc_feature (1)..(106): Pre-microRNA sequence
gcgcagcgccctgtctcccagcctgaggtgcagtgctgcatctctggtcagttgggagtctgagatgaagcactgtagctcaggaagagagaagttgttctgcagc

SEQ ID NO: 1341 - DNA, 110 bp, Homo sapiens
  misc_feature (1)..(110): Pre-microRNA sequence
gagctgcttgcctccccccgtttttggcaatggtagaactcacactggtgaggtaacaggatccggtggttctagacttgccaactatggggcgaggactcagccggcac

SEQ ID NO: 1342 - DNA, 110 bp, Homo sapiens
  misc_feature (1)..(110): Pre-microRNA sequence
ccgcagagtgtgactcctgttctgtgtatggcactggtagaattcactgtgaacagtctcagtcagtgaattaccgaagggccataaacagagcagagacagatccacga

SEQ ID NO: 1343 - DNA, 62 bp, Homo sapiens; identical to SEQ ID NO: 686
  misc_feature (1)..(62): Pre-microRNA sequence

SEQ ID NO: 1344 - DNA, 82 bp, Homo sapiens; identical to SEQ ID NO: 774
  misc_feature (1)..(82): Pre-microRNA sequence

SEQ ID NO: 1345 - DNA, 90 bp, Homo sapiens
  misc_feature (1)..(90): Pre-microRNA sequence
ccgggcccctgtgagcatcttaccggacagtgctggatttcccagcttgactctaacactgtctggtaacgatgttcaaaggtgacccgc

SEQ ID NO: 1346 - DNA, 95 bp, Homo sapiens; identical to SEQ ID NO: 692
  misc_feature (1)..(95): Pre-microRNA sequence

SEQ ID NO: 1347 - DNA, 68 bp, Homo sapiens; identical to SEQ ID NO: 693
  misc_feature (1)..(68): Pre-microRNA sequence

SEQ ID NO: 1348 - DNA, 110 bp, Homo sapiens; identical to SEQ ID NO: 694
  misc_feature (1)..(110): Pre-microRNA sequence

SEQ ID NO: 1349 - DNA, 69 bp, Homo sapiens; identical to SEQ ID NO: 776
  misc_feature (1)..(69): Pre-microRNA sequence

SEQ ID NO: 1350 - DNA, 72 bp, Homo sapiens; identical to SEQ ID NO: 695
  misc_feature (1)..(72): Pre-microRNA sequence

SEQ ID NO: 1351 - DNA, 88 bp, Homo sapiens; identical to SEQ ID NO: 706
  misc_feature (1)..(88): Pre-microRNA sequence

SEQ ID NO: 1352 - DNA, 89 bp, Homo sapiens; identical to SEQ ID NO: 713
  misc_feature (1)..(89): Pre-microRNA sequence

SEQ ID NO: 1353 - DNA, 64 bp, Homo sapiens; identical to SEQ ID NO: 721
  misc_feature (1)..(64): Pre-microRNA sequence

SEQ ID NO: 1354 - DNA, 66 bp, Homo sapiens
  misc_feature (1)..(66): Pre-microRNA sequence
aaaaggtggatattccttctatgtttatgttatttatggttaaacatagaggaaattccacgtttt

SEQ ID NO: 1355 - DNA, 83 bp, Homo sapiens
  misc_feature (1)..(83): Pre-microRNA sequence
cgccggccgatgggcgtcttaccagacatggttagacctggccctctgtctaatactgtctggtaaaaccgtccatccgctgc

SEQ ID NO: 1356 - DNA, 76 bp, Homo sapiens; identical to SEQ ID NO: 724
  misc_feature (1)..(76): Pre-microRNA sequence

SEQ ID NO: 1357 - DNA, 90 bp, Homo sapiens
  misc_feature (1)..(90): Pre-microRNA sequence
tctcaggttgtgaccttctcgaggaaagaagcactttctgttgtctgaaagaaaagaaagtgcttcctttcagagggttacggtttgaga

SEQ ID NO: 1358 - DNA, 90 bp, Homo sapiens; identical to SEQ ID NO: 730
  misc_feature (1)..(90): Pre-microRNA sequence

SEQ ID NO: 1359 - DNA, 110 bp, Homo sapiens; identical to SEQ ID NO: 789
  misc_feature (1)..(110): Pre-microRNA sequence

SEQ ID NO: 1360 - DNA, 110 bp, Homo sapiens; identical to SEQ ID NO: 788
  misc_feature (1)..(110): Pre-microRNA sequence

SEQ ID NO: 1361 - DNA, 110 bp, Homo sapiens; identical to SEQ ID NO: 790
  misc_feature (1)..(110): Pre-microRNA sequence

SEQ ID NO: 1362 - DNA, 110 bp, Homo sapiens
  misc_feature (1)..(110): Pre-microRNA sequence
ccggatctcacacggtggtgttaatatctcgctggggcctccaaaatgttgtgcccaggggtgttagagaaaacaccacactttgagatgaattaagagtcctttattag

SEQ ID NO: 1363 - DNA, 54 bp, Artificial Sequence; identical to SEQ ID NO: 157
  Synthetic probe

SEQ ID NO: 1364 - DNA, 38 bp, Artificial Sequence; identical to SEQ ID NO: 158
  Synthetic probe

SEQ ID NO: 1365 - DNA, 32 bp, Artificial Sequence; identical to SEQ ID NO: 329
  Synthetic probe

SEQ ID NO: 1366 - DNA, 30 bp, Artificial Sequence
  Synthetic probe
ccgtggatgtcaactcagctgccttccgcc

SEQ ID NO: 1367 - DNA, 35 bp, Artificial Sequence
  Synthetic probe
tcaaaaaattctttttcctttgctctctcttctgt

SEQ ID NO: 1368 - DNA, 30 bp, Artificial Sequence; identical to SEQ ID NO: 140
  Synthetic probe

SEQ ID NO: 1369 - DNA, 32 bp, Artificial Sequence
  Synthetic probe
acctattgttcgccagggcccccacccgatgt

SEQ ID NO: 1370 - DNA, 28 bp, Artificial Sequence
  Synthetic probe
tgccctgcccaccccctcccctgccccg

SEQ ID NO: 1371 - DNA, 32 bp, Artificial Sequence; identical to SEQ ID NO: 144
  Synthetic probe

SEQ ID NO: 1372 - DNA, 36 bp, Artificial Sequence
  Synthetic probe
acccttctctcaaaagcgacccctcccatccagtcc

SEQ ID NO: 1373 - DNA, 35 bp, Artificial Sequence; identical to SEQ ID NO: 146
  Synthetic probe

SEQ ID NO: 1374 - DNA, 32 bp, Artificial Sequence
  Synthetic probe
tgctaattgtgccctgttgtctttcttaaact

SEQ ID NO: 1375 - DNA, 30 bp, Artificial Sequence
  Synthetic probe
taactgtcctgagccccttctttatattgc

SEQ ID NO: 1376 - DNA, 31 bp, Artificial Sequence
  Synthetic probe
gccttcacccttcccatcctggctcatgaat

SEQ ID NO: 1377 - DNA, 30 bp, Artificial Sequence
  Synthetic probe
ccaccccctctacggtccccaccagccccg

SEQ ID NO: 1378 - DNA, 33 bp, Artificial Sequence
  Synthetic probe
ctcagtgatgacaaatgaccgctgtcagccgcc

SEQ ID NO: 1379 - DNA, 36 bp, Artificial Sequence
  Synthetic probe
ccctccgcccccacactgcatccttgcccagtttgg

SEQ ID NO: 1380 - DNA, 35 bp, Artificial Sequence; identical to SEQ ID NO: 1099
  Synthetic probe

SEQ ID NO: 1381 - DNA, 46 bp, Artificial Sequence; identical to SEQ ID NO: 149
  Synthetic probe

SEQ ID NO: 1382 - DNA, 33 bp, Artificial Sequence
  Synthetic probe
tgacctcagcgtgccccctttcaaccacagacg

SEQ ID NO: 1383 - DNA, 38 bp, Artificial Sequence
  Synthetic probe
caaggcgtcgccatgaaaatccaccccatggagtagca

SEQ ID NO: 1384 - DNA, 29 bp, Artificial Sequence
  Synthetic probe
atgtaaatgtgccatattgccgcccatct

SEQ ID NO: 1385 - DNA, 28 bp, Artificial Sequence
  Synthetic probe
ccccgcccctggcgcgcccccgacaggc

SEQ ID NO: 1386 - DNA, 35 bp, Artificial Sequence
  Synthetic probe
gacccggccccgcagccagcacccggccaccgcgc

SEQ ID NO: 1387 - DNA, 34 bp, Artificial Sequence
  Synthetic probe
gtcgcggccgcccggccctcccggtcccctcccc

SEQ ID NO: 1388 - DNA, 31 bp, Artificial Sequence
  Synthetic probe
tcagcccccagcgccccccggagttcttgga

SEQ ID NO: 1389 - DNA, 28 bp, Artificial Sequence
  Synthetic probe
aacccgggctcccccacccgctccctga

SEQ ID NO: 1390 - DNA, 32 bp, Artificial Sequence
  Synthetic probe
ccggtgtgcgccccctcctacctctgccggcc

SEQ ID NO: 1391 - DNA, 34 bp, Artificial Sequence
  Synthetic probe
ggcgccctgggcctcggcgccccgcccgtcccag

SEQ ID NO: 1392 - DNA, 32 bp, Artificial Sequence
  Synthetic probe
aaatcctcgccatcctccacccccagccccgg

SEQ ID NO: 1393 - DNA, 35 bp, Artificial Sequence
  Synthetic probe
agccgagcccccgcccccgccgggatgctgccctc

SEQ ID NO: 1394 - DNA, 32 bp, Artificial Sequence
  Synthetic probe
ctggcgccctcccccgcccggggctcagcctc

SEQ ID NO: 1395 - DNA, 33 bp, Artificial Sequence
  Synthetic probe
ctctcgcgaccgacctgccgccgaccgccacag

SEQ ID NO: 1396 - DNA, 34 bp, Artificial Sequence
  Synthetic probe
aaacaaagtacttccgacctccccgcccgcccgc

SEQ ID NO: 1397 - DNA, 34 bp, Artificial Sequence
  Synthetic probe
ccccagccccttcctggccaggaccccagcgagg

SEQ ID NO: 1398 - DNA, 33 bp, Artificial Sequence
  Synthetic probe
ccaccccctcaagcccccaggagcttccttaac

SEQ ID NO: 1399 - DNA, 32 bp, Artificial Sequence
  Synthetic probe
cagccgcgccggccgccagcgccccggcgcgc

SEQ ID NO: 1400 - DNA, 35 bp, Artificial Sequence
  Synthetic probe
gtgcccgtgccctaagcgaccctccactccctcaa

SEQ ID NO: 1401 - DNA, 34 bp, Artificial Sequence
  Synthetic probe
ctgcctccctgaccccaaaacacacctgactgcc

SEQ ID NO: 1402 - DNA, 32 bp, Artificial Sequence
  Synthetic probe
gctccatttccccactgaaatgacaaaatcca

SEQ ID NO: 1403 - DNA, 35 bp, Artificial Sequence
  Synthetic probe
gaacacctcctccttttccctttggtgaataaaga

SEQ ID NO: 1404 - DNA, 34 bp, Artificial Sequence
  Synthetic probe
gactcccttccacccccatttcccacctactaat

SEQ ID NO: 1405 - DNA, 34 bp, Artificial Sequence
  Synthetic probe
ctgattcaaaacccacctctacaacttaatagct

SEQ ID NO: 1406 - DNA, 34 bp, Artificial Sequence
  Synthetic probe
gccccctccatagagagaggccccaggggagtga

SEQ ID NO: 1407 - DNA, 25 bp, Artificial Sequence
  Synthetic probe
ggagtctacaacatccctcccgcct

SEQ ID NO: 1408 - DNA, 33 bp, Artificial Sequence
  Synthetic probe
aatgatgtcaccttggtctggttgcccccaccc

SEQ ID NO: 1409 - DNA, 35 bp, Artificial Sequence
  Synthetic probe
gggtgaagacagacagaacccagaccctcccatag

SEQ ID NO: 1410 - DNA, 29 bp, Artificial Sequence
  Synthetic probe
caggccccagtgccaccgccaaggctatc

SEQ ID NO: 1411 - DNA, 35 bp, Artificial Sequence
  Synthetic probe
ctccaacccccgcaattctcgctcccttcacctga

SEQ ID NO: 1412 - DNA, 33 bp, Artificial Sequence
  Synthetic probe
gcacagcagaccccatgcactagccccgggcac

SEQ ID NO: 1413 - DNA, 36 bp, Artificial Sequence
  Synthetic probe
acgcacccctatctcccaccccccgcaagccaagca

SEQ ID NO: 1414 - DNA, 35 bp, Artificial Sequence
  Synthetic probe
tccccggacctaagcatctcccccacccgccaacc

SEQ ID NO: 1415 - DNA, 33 bp, Artificial Sequence
  Synthetic probe
ggaggtagcccccaaatctagttgaaccaattc

SEQ ID NO: 1416 - DNA, 32 bp, Artificial Sequence
  Synthetic probe
ggatttcaccaaacgtatagcccccaccagta

SEQ ID NO: 1417 - DNA, 28 bp, Artificial Sequence
  Synthetic probe
tgaaagctgaagtccagcccagccctct

SEQ ID NO: 1418 - DNA, 33 bp, Artificial Sequence
  Synthetic probe
atcaccaacaaccttgccccactccaagccctg

SEQ ID NO: 1419 - DNA, 35 bp, Artificial Sequence
  Synthetic probe
cctgagaacccccgaccctcaagtgttcagcaggc

SEQ ID NO: 1420 - DNA, 33 bp, Artificial Sequence
  Synthetic probe
cgaccccgcagaaccccaccgcgccccgcgcag

SEQ ID NO: 1421 - DNA, 32 bp, Artificial Sequence
  Synthetic probe
gcaggacccacctccctactcctggcccaggt

SEQ ID NO: 1422 - DNA, 33 bp, Artificial Sequence
  Synthetic probe
agcctcagccccacctccagccccaccctaggg

SEQ ID NO: 1423 - DNA, 33 bp, Artificial Sequence
  Synthetic probe
aacagcagacagggtcccagggccctcccttgt

SEQ ID NO: 1424 - DNA, 33 bp, Artificial Sequence
  Synthetic probe
accccctccagggccgaccaccccaacccaaac

SEQ ID NO: 1425 - DNA, 33 bp, Artificial Sequence
  Synthetic probe
gactctgccgctcccgcccggccacctccctgt

SEQ ID NO: 1426 - DNA, 35 bp, Artificial Sequence
  Synthetic probe
tcctcccctccgcgaaagcctaaacttacccctca

SEQ ID NO: 1427 - DNA, 34 bp, Artificial Sequence
  Synthetic probe
agccttcctgtcccctggcccccgacctgctcca

SEQ ID NO: 1428 - DNA, 32 bp, Artificial Sequence
  Synthetic probe
agcccgccccaacccacctcgatcttttcctc

SEQ ID NO: 1429 - DNA, 34 bp, Artificial Sequence
  Synthetic probe
cgaggaggccctgagcactgcccacccccacacc

SEQ ID NO: 1430 - DNA, 36 bp, Artificial Sequence
  Synthetic probe
acacttgcccctgccagccctggtcagggccaccct

SEQ ID NO: 1431 - DNA, 33 bp, Artificial Sequence
  Synthetic probe
gctctaacccccgcaaccccacctccccatgcc

SEQ ID NO: 1432 - DNA, 32 bp, Artificial Sequence
  Synthetic probe
ttcgccacgccccgccacccgagctgcctccc

SEQ ID NO: 1433 - DNA, 34 bp, Artificial Sequence
  Synthetic probe
agaccaaagccctcccaccccttcccctcccagc

SEQ ID NO: 1434 - DNA, 33 bp, Artificial Sequence
  Synthetic probe
gaaaacaaacatctaataaactctcaggatacc

SEQ ID NO: 1435 - DNA, 31 bp, Artificial Sequence
  Synthetic probe
tcagaggaccccccgacccaccccgcgaggc

SEQ ID NO: 1436 - DNA, 34 bp, Artificial Sequence
  Synthetic probe
gaacagtcactgcctgccccaacctctttcagga

SEQ ID NO: 1437 - DNA, 32 bp, Artificial Sequence
  Synthetic probe
caaaaaataaaccaaaaacccaccacctaatg

SEQ ID NO: 1438 - DNA, 32 bp, Artificial Sequence
  Synthetic probe
acattcatctctgtcagatccctccctcacca

SEQ ID NO: 1439 - DNA, 33 bp, Artificial Sequence
  Synthetic probe
tctatattccccctccatgaccatttgtattag

SEQ ID NO: 1440 - DNA, 31 bp, Artificial Sequence
  Synthetic probe
gctgggggattctgcccatgcttcacctccc

SEQ ID NO: 1441 - DNA, 35 bp, Artificial Sequence
  Synthetic probe
gggtctcctgccacctcctctgagaagccccacca

SEQ ID NO: 1442 - DNA, 32 bp, Artificial Sequence
  Synthetic probe
ggtggggagactgggagagagccctcctaatg

SEQ ID NO: 1443 - DNA, 34 bp, Artificial Sequence
  Synthetic probe
taactcgcctgctgccccggcggcctgcccgccg

SEQ ID NO: 1444 - DNA, 35 bp, Artificial Sequence
  Synthetic probe
tggtcgccgccgcaggcgcctgaagggcacggcgg

SEQ ID NO: 1445 - DNA, 35 bp, Artificial Sequence
  Synthetic probe
acgcgccccgccgctctctgaccgaccggaggcgc

SEQ ID NO: 1446 - DNA, 34 bp, Artificial Sequence
  Synthetic probe
cctgtagctgccactgccccttcctcactcaacc

SEQ ID NO: 1447 - DNA, 34 bp, Artificial Sequence
  Synthetic probe
acccgtccctgcccctttaccccttgggccagca

SEQ ID NO: 1448 - DNA, 33 bp, Artificial Sequence
  Synthetic probe
tagctccagtgcctccagctccaaccacctgaa

SEQ ID NO: 1449 - DNA, 35 bp, Artificial Sequence
  Synthetic probe
ggggccgctccccagcaccgacgccagcatcatcg

SEQ ID NO: 1450 - DNA, 35 bp, Artificial Sequence
  Synthetic probe
accccctccagggccgaccaccccaacccaaacaa

SEQ ID NO: 1451 - DNA, 33 bp, Artificial Sequence
  Synthetic probe
cagagctccccccatctccccagacttacccct

SEQ ID NO: 1452 - DNA, 35 bp, Artificial Sequence
  Synthetic probe
aatcgccgtccccgccgcggcattcccggccccaa

SEQ ID NO: 1453 - DNA, 33 bp, Artificial Sequence
  Synthetic probe
acacccctccaaaaccacacagagcaagcaagg

SEQ ID NO: 1454 - DNA, 34 bp, Artificial Sequence
  Synthetic probe
ttgtgccccctcctctgccatggctggtccctgg

SEQ ID NO: 1455 - DNA, 32 bp, Artificial Sequence
  Synthetic probe
gccagaattaccactgtatctgtccccacccc

SEQ ID NO: 1456 - DNA, 33 bp, Artificial Sequence
  Synthetic probe
cactccctgctggcccccacctcacctatggtg

SEQ ID NO: 1457 - DNA, 34 bp, Artificial Sequence
  Synthetic probe
cacccccaccccacaggacagaggaagtgacgag

SEQ ID NO: 1458 - DNA, 35 bp, Artificial Sequence
  Synthetic probe
ggacccctgccttccttgctgccaccctttgcaca

SEQ ID NO: 1459 - DNA, 33 bp, Artificial Sequence
  Synthetic probe
gctatgcacccagccgcccagctcagcccctgc

SEQ ID NO: 1460 - DNA, 33 bp, Artificial Sequence
  Synthetic probe
ggagccaccccaccctcctcccaagacccacat

SEQ ID NO: 1461 - DNA, 33 bp, Artificial Sequence
  Synthetic probe
cccaagcgccccttcctccctccttccctcccg

SEQ ID NO: 1462 - DNA, 34 bp, Artificial Sequence
  Synthetic probe
tgcctggccaggcctccgccccttggctcgccac

SEQ ID NO: 1463 - DNA, 32 bp, Artificial Sequence
  Synthetic probe
cagggcttcagcctccccacagccccacactt

SEQ ID NO: 1464 - DNA, 33 bp, Artificial Sequence
  Synthetic probe
cctcccctgaacccagttgccacaactttccac

SEQ ID NO: 1465 - DNA, 35 bp, Artificial Sequence
  Synthetic probe
cactcacatcagcccatccacctccacctctccac

SEQ ID NO: 1466 - DNA, 33 bp, Artificial Sequence
  Synthetic probe
atccattgccactaccaccaccaataattaaaa

SEQ ID NO: 1467 - DNA, 32 bp, Artificial Sequence
  Synthetic probe
tgccaccccacccctcccccacagcccagccc

SEQ ID NO: 1468 - DNA, 33 bp, Artificial Sequence
  Synthetic probe
cctgtctcccatgccgtgtccctcccactaacc

SEQ ID NO: 1469 - DNA, 34 bp, Artificial Sequence
  Synthetic probe
ccaccaccttgctgctggcccacagcaccaggcc

SEQ ID NO: 1470 - DNA, 32 bp, Artificial Sequence
  Synthetic probe
cagagattccggcttccccccacccgcccttc

SEQ ID NO: 1471 - DNA, 33 bp, Artificial Sequence
  Synthetic probe
tcacctgcccccacatctgcaacacacaagagt

SEQ ID NO: 1472 - DNA, 29 bp, Artificial Sequence
  Synthetic probe
ccatactctccagctgtcttccctcccaa

SEQ ID NO: 1473 - DNA, 32 bp, Artificial Sequence
  Synthetic probe
tcctggcaggactcccctcccctcccactgtg

SEQ ID NO: 1474 - DNA, 35 bp, Artificial Sequence
  Synthetic probe
acctcagcctccactgccctcctgccgcatcctat

SEQ ID NO: 1475 - DNA, 33 bp, Artificial Sequence
  Synthetic probe
tctttttctgacattccctcccccaacatggaa

SEQ ID NO: 1476 - DNA, 33 bp, Artificial Sequence
  Synthetic probe
gactgagggtttaaagaagatggtgtccgccgc

SEQ ID NO: 1477 - DNA, 33 bp, Artificial Sequence
  Synthetic probe
cctccacccctcccgcagcgcccctccccctca

SEQ ID NO: 1478 - DNA, 32 bp, Artificial Sequence
  Synthetic probe
caccacctgtgtgggctatcccagccgcctcc

SEQ ID NO: 1479 - DNA, 34 bp, Artificial Sequence
  Synthetic probe
gcttcggccacagaaatgttcgccctctgaaatc

SEQ ID NO: 1480 - DNA, 32 bp, Artificial Sequence
  Synthetic probe
ctgccccacaaagctcctggaaccccctcagt

SEQ ID NO: 1481 - DNA, 35 bp, Artificial Sequence
  Synthetic probe
tgaccacacccacccctatcctttcctgcagtgtg

SEQ ID NO: 1482 - DNA, 32 bp, Artificial Sequence
  Synthetic probe
ggcccctggcctccctgccacccagcacggtg

SEQ ID NO: 1483 - DNA, 35 bp, Artificial Sequence
  Synthetic probe
cctcctcaccaccccctccacactcctggggaagt

SEQ ID NO: 1484 - DNA, 34 bp, Artificial Sequence
  Synthetic probe
gggaagcagagtcagtgaccccagccctgcacac

SEQ ID NO: 1485 - DNA, 35 bp, Artificial Sequence
  Synthetic probe
ggcccccaccgtcacctgctgacaccctcacatcc

SEQ ID NO: 1486 - DNA, 31 bp, Artificial Sequence
  Synthetic probe
tcccaggacccttcctgagcctcagcccatt

SEQ ID NO: 1487 - DNA, 35 bp, Artificial Sequence
  Synthetic probe
tccccagagcccgccccaacccacctcgatctttt

SEQ ID NO: 1488 - DNA, 32 bp, Artificial Sequence
  Synthetic probe
catgccccaccctcacctctgctccacatact

SEQ ID NO: 1489 - DNA, 35 bp, Artificial Sequence
  Synthetic probe
gcccttactccagccccaccggctcccactcacct

SEQ ID NO: 1490 - DNA, 30 bp, Artificial Sequence
  Synthetic probe
agccttcctgtcccctggcccccgacctgc

SEQ ID NO: 1491 - DNA, 36 bp, Artificial Sequence
  Synthetic probe
gagaacctgaaaccccagcccctgcctaccccttag

SEQ ID NO: 1492 - DNA, 35 bp, Artificial Sequence
  Synthetic probe
tctgctgcaggtagtctgaatgtccccccaacatc

SEQ ID NO: 1493 - DNA, 34 bp, Artificial Sequence
  Synthetic probe
aactcccagccccggaagaatgcacacgcaggag

SEQ ID NO: 1494 - DNA, 27 bp, Artificial Sequence
  Synthetic probe
aatgactcctccggcgccacctacagt

SEQ ID NO: 1495 - DNA, 32 bp, Artificial Sequence
  Synthetic probe
gacctgccccgccccactcgggctccttaccg

SEQ ID NO: 1496 - DNA, 31 bp, Artificial Sequence
  Synthetic probe
tccccccaacctggggccaggcccacctggt

SEQ ID NO: 1497 - DNA, 27 bp, Artificial Sequence
  Synthetic probe
agtcaagatggcgccccctggtcccag

SEQ ID NO: 1498 - DNA, 32 bp, Artificial Sequence
  Synthetic probe
gccctcccctgactccctgaagctatttgttt

SEQ ID NO: 1499 - DNA, 33 bp, Artificial Sequence
  Synthetic probe
tgccctcccagtcatatgcgccgcatcaaggtt

SEQ ID NO: 1500 - DNA, 34 bp, Artificial Sequence
  Synthetic probe
ttcttacctccccccaacccccatcccagttacc

SEQ ID NO: 1501 - DNA, 35 bp, Artificial Sequence
  Synthetic probe
cgacacccactcactgccgctgccgcactcacagc

SEQ ID NO: 1502 - DNA, 33 bp, Artificial Sequence
  Synthetic probe
acctccccaaactccacgtaatcacctactatt

SEQ ID NO: 1503 - DNA, 31 bp, Artificial Sequence
  Synthetic probe
cagatgccccgctatgaaatcttttccaacc

SEQ ID NO: 1504 - DNA, 33 bp, Artificial Sequence
  Synthetic probe
cctcctcggcactccctctacctcactgtccac

SEQ ID NO: 1505 - DNA, 36 bp, Artificial Sequence
  Synthetic probe
tccccagccccgtccccaccccctagagaaagtgaa

SEQ ID NO: 1506 - DNA, 32 bp, Artificial Sequence
  Synthetic probe
atccaggactcggaccagccccccagcctgag

SEQ ID NO: 1507 - DNA, 34 bp, Artificial Sequence
  Synthetic probe
gggggaaagcctgtggtcaagccaaggaacaaga

SEQ ID NO: 1508 - DNA, 35 bp, Artificial Sequence
  Synthetic probe
tgtgcccccctcgctcccagcccccaggggaccgc

SEQ ID NO: 1509 - DNA, 32 bp, Artificial Sequence
  Synthetic probe
atcctccctgggtggtgctactctcaccaaag

SEQ ID NO: 1510 - DNA, 34 bp, Artificial Sequence
  Synthetic probe
accttagctctacccaacctcgcttcccaccccc

SEQ ID NO: 1511 - DNA, 35 bp, Artificial Sequence
  Synthetic probe
ccatgctctcgcgtgatctcccctaccgccatcgt

SEQ ID NO: 1512 - DNA, 32 bp, Artificial Sequence
  Synthetic probe
ttcccagagcctcaccccctctttttctaacc

SEQ ID NO: 1513 - DNA, 30 bp, Artificial Sequence
  Synthetic probe
gtcgccccctcccccaagttgagacttgca

SEQ ID NO: 1514 - DNA, 34 bp, Artificial Sequence
  Synthetic probe
cacctcccgctcaactgcccatactaatgctttt

SEQ ID NO: 1515 - DNA, 33 bp, Artificial Sequence
  Synthetic probe
ccacagccaccccgtgccactgtgtcccaaccc

SEQ ID NO: 1516 - DNA, 36 bp, Artificial Sequence
  Synthetic probe
cagcctgccaccgccgcttttgaaagaagcacttca

SEQ ID NO: 1517 - DNA, 31 bp, Artificial Sequence
  Synthetic probe
ccgccctccccatagcctcaccccaaaccca

SEQ ID NO: 1518 - DNA, 35 bp, Artificial Sequence
  Synthetic probe
tccctttccctgccagcaaaccccaccaccctaag

SEQ ID NO: 1519 - DNA, 32 bp, Artificial Sequence
  Synthetic probe
ctgaagatgctcccagaggccccccgccggcc

SEQ ID NO: 1520 - DNA, 31 bp, Artificial Sequence
  Synthetic probe
ccgacccgcccgtcagccgcctccccctcag

SEQ ID NO: 1521 - DNA, 39 bp, Artificial Sequence
  Synthetic probe
tcccttcactccagttgccaaacagatccccccactccc

SEQ ID NO: 1522 - DNA, 30 bp, Artificial Sequence
  Synthetic probe
gagcactcaatctgacacccctcgccgggg

SEQ ID NO: 1523 - DNA, 32 bp, Artificial Sequence; identical to SEQ ID NO: 12
  Synthetic probe

SEQ ID NO: 1524 - DNA, 35 bp, Artificial Sequence
  Synthetic probe
accccagagctgtcgccgccgctgccgccttcgcc

SEQ ID NO: 1525 - DNA, 34 bp, Artificial Sequence; identical to SEQ ID NO: 13
  Synthetic probe

SEQ ID NO: 1526 - DNA, 41 bp, Artificial Sequence
  Synthetic probe
ctatggcacttgcatggttgagctatcagcagggggaccat

SEQ ID NO: 1527 - DNA, 29 bp, Artificial Sequence
  Synthetic probe
gagagaaagcccccctttgtctggctttg

SEQ ID NO: 1528 - DNA, 30 bp, Artificial Sequence
  Synthetic probe
ggcgagagagaaagcccccctttgtctggc

SEQ ID NO: 1529 - DNA, 43 bp, Artificial Sequence
  Synthetic probe
ccagctccactactccgtccccgaggaagcaaaacacggcacc

SEQ ID NO: 1530 - DNA, 34 bp, Artificial Sequence
  Synthetic probe
tcagccagcacgccgtccatgtccaccagcaccc

SEQ ID NO: 1531 - DNA, 34 bp, Artificial Sequence
  Synthetic probe
tcagcgtcttgctctcctcctggtaacagcagcc

SEQ ID NO: 1532 - DNA, 40 bp, Artificial Sequence
  Synthetic probe
cctagagaacatatatctggtgcctctcctcttttcccgt

SEQ ID NO: 1533 - DNA, 60 bp, Artificial Sequence; identical to SEQ ID NO: 151
  Synthetic probe

SEQ ID NO: 1534 - DNA, 36 bp, Artificial Sequence; identical to SEQ ID NO: 152
  Synthetic probe

SEQ ID NO: 1535 - DNA, 39 bp, Artificial Sequence; identical to SEQ ID NO: 153
  Synthetic probe

SEQ ID NO: 1536 - DNA, 30 bp, Artificial Sequence; identical to SEQ ID NO: 154
  Synthetic probe

SEQ ID NO: 1537 - DNA, 52 bp, Artificial Sequence; identical to SEQ ID NO: 155
  Synthetic probe

SEQ ID NO: 1538 - DNA, 55 bp, Artificial Sequence; identical to SEQ ID NO: 156
  Synthetic probe

SEQ ID NO: 1539 - DNA, 33 bp, Artificial Sequence; identical to SEQ ID NO: 20
  Synthetic probe

SEQ ID NO: 1540 - DNA, 31 bp, Artificial Sequence
  Synthetic probe
cctgggggtgggcgggagctggccccactgc

SEQ ID NO: 1541 - DNA, 30 bp, Artificial Sequence; identical to SEQ ID NO: 268
  Synthetic probe

SEQ ID NO: 1542 - DNA, 34 bp, Artificial Sequence
  Synthetic probe
ttcttcccccgccctcgccgcggccgcgcaccgg

SEQ ID NO: 1543 - DNA, 31 bp, Artificial Sequence
  Synthetic probe
ctcagcgtctccctccctcatgtgcacatgt

SEQ ID NO: 1544 - DNA, 33 bp, Artificial Sequence; identical to SEQ ID NO: 274
  Synthetic probe

SEQ ID NO: 1545 - DNA, 44 bp, Artificial Sequence
  Synthetic probe
tccatcaccccccaggctgactctggctcctgcctggctctgcc

SEQ ID NO: 1546 - DNA, 43 bp, Artificial Sequence
  Synthetic probe
ccagctccactactccgtccccgaggaggccaaacacggcacc

SEQ ID NO: 1547 - DNA, 33 bp, Artificial Sequence
  Synthetic probe
ctatagcagatgacataactcccccggcatcag

SEQ ID NO: 1548 - DNA, 26 bp, Artificial Sequence
  Synthetic probe
cctctggcccctgcctaattggctgc

SEQ ID NO: 1549 - DNA, 27 bp, Artificial Sequence
  Synthetic probe
gccctctggcccctgcctaattggctg

SEQ ID NO: 1550 - DNA, 33 bp, Artificial Sequence
  Synthetic probe
cagcgctccccttccttatttgagatctgtgca

SEQ ID NO: 1551 - DNA, 28 bp, Artificial Sequence
  Synthetic probe
gactccccccaacacctgcgggtggcac

SEQ ID NO: 1552 - DNA, 32 bp, Artificial Sequence
  Synthetic probe
aagccagttacagcccccactgcccccataac

SEQ ID NO: 1553 - DNA, 30 bp, Artificial Sequence
  Synthetic probe
gaactctgcctcctgtttgctacaaaaaca

SEQ ID NO: 1554 - DNA, 30 bp, Artificial Sequence
  Synthetic probe
gattttacaatcgggctgttaaccctcccg

SEQ ID NO: 1555 - DNA, 26 bp, Artificial Sequence
  Synthetic probe
cacagccccttcctgtgacttcacac

SEQ ID NO: 1556 - DNA, 30 bp, Artificial Sequence
  Synthetic probe
tacccctggcccccagctgtgattgtctaa

SEQ ID NO: 1557 - DNA, 29 bp, Artificial Sequence
  Synthetic probe
gacgctgacccaccgcagcccgcactgtt

SEQ ID NO: 1558 - DNA, 28 bp, Artificial Sequence
  Synthetic probe
cgcacccgtcccgttcgtccccggacgt

SEQ ID NO: 1559 - DNA, 35 bp, Artificial Sequence
  Synthetic probe
cgccgctccttgtacgcgtacttctgctgcacacc

SEQ ID NO: 1560 - DNA, 31 bp, Artificial Sequence
  Synthetic probe
gacccccgccccagtcccagcccaattaata

SEQ ID NO: 1561 - DNA, 30 bp, Artificial Sequence
  Synthetic probe
aactcccctttgaccccccagtacaaactg

SEQ ID NO: 1562 - DNA, 28 bp, Artificial Sequence
  Synthetic probe
aaagctgccccatggggatccaacccca

SEQ ID NO: 1563 - DNA, 32 bp, Artificial Sequence
  Synthetic probe
ccaccaaaccaaatgccgctgctctccttcca

SEQ ID NO: 1564 - DNA, 39 bp, Artificial Sequence
  Synthetic probe
gccgtcgcccaccagatcactcatcaggccatggtggca

SEQ ID NO: 1565 - DNA, 33 bp, Artificial Sequence
  Synthetic probe
aggtctgtcttgggtgggccctccccagagcac

SEQ ID NO: 1566 - DNA, 33 bp, Artificial Sequence
  Synthetic probe
ggaaagagaacagagagagccctcccagcagcc

SEQ ID NO: 1567 - DNA, 30 bp, Artificial Sequence
  Synthetic probe
ccccaccccctcatcagctgctcccagatc

SEQ ID NO: 1568 - DNA, 27 bp, Artificial Sequence
  Synthetic probe
ggccctccccctgcctgtgataggctg

SEQ ID NO: 1569 - DNA, 32 bp, Artificial Sequence; identical to SEQ ID NO: 40
  Synthetic probe

SEQ ID NO: 1570 - DNA, 31 bp, Artificial Sequence
  Synthetic probe
atcataatcccccttttgactttacatgatc

SEQ ID NO: 1571 - DNA, 36 bp, Artificial Sequence
  Synthetic probe
tgctttattgactaatgaacctaccgtgccgccaac

SEQ ID NO: 1572 - DNA, 33 bp, Artificial Sequence
  Synthetic probe
gccctccctctccgaaagaatgtgtcacccggg

SEQ ID NO: 1573 - DNA, 38 bp, Artificial Sequence
  Synthetic probe
gcctgctctgccaaccccaaatccgtcaagacgcatag

SEQ ID NO: 1574 - DNA, 35 bp, Artificial Sequence
  Synthetic probe
cccccttgaggttcctactgaaatctgacaatcag

SEQ ID NO: 1575 - DNA, 32 bp, Artificial Sequence
  Synthetic probe
acccccacctttttcctgtaccttacccggag

SEQ ID NO: 1576 - DNA, 32 bp, Artificial Sequence
  Synthetic probe
caacaatacccccacctttttcctgtacctta

SEQ ID NO: 1577 - DNA, 30 bp, Artificial Sequence; identical to SEQ ID NO: 48
  Synthetic probe

SEQ ID NO: 1578 - DNA, 39 bp, Artificial Sequence
  Synthetic probe
aaggcagagccagatgactggtccaaccccccagagacc

SEQ ID NO: 1579 - DNA, 33 bp, Artificial Sequence
  Synthetic probe
ctgtctccattactgcctgccaccttctccatc

SEQ ID NO: 1580 - DNA, 29 bp, Artificial Sequence
  Synthetic probe
ctttcccttatgttttaatcctgccccgt

SEQ ID NO: 1581 - DNA, 34 bp, Artificial Sequence
  Synthetic probe
aatccgtgaagataaaaaaccacccacccagcac

SEQ ID NO: 1582 - DNA, 31 bp, Artificial Sequence
  Synthetic probe
gccgccgccgccgcgtcttcccgcgaagcct

SEQ ID NO: 1583 - DNA, 39 bp, Artificial Sequence
  Synthetic probe
cccccacagtggcatatgtgacaaacccaaagcccctgg

SEQ ID NO: 1584 - DNA, 31 bp, Artificial Sequence; identical to SEQ ID NO: 55
  Synthetic probe

SEQ ID NO: 1585 - DNA, 31 bp, Artificial Sequence
  Synthetic probe
ggccctgcccacggaccgactcccgcggccc

SEQ ID NO: 1586 - DNA, 32 bp, Artificial Sequence; identical to SEQ ID NO: 56
  Synthetic probe

SEQ ID NO: 1587 - DNA, 30 bp, Artificial Sequence
  Synthetic probe
tgcagccctcccaccagccagctgcagtgc

SEQ ID NO: 1588 - DNA, 34 bp, Artificial Sequence
  Synthetic probe
ccccatcccccatatgacgcttccccctcctaac

SEQ ID NO: 1589 - DNA, 30 bp, Artificial Sequence
  Synthetic probe
ccccctcccccacccaccacttcccctaga

SEQ ID NO: 1590 - DNA, 32 bp, Artificial Sequence
  Synthetic probe
gtcggccctgcctcctcctcctctcaccaagc

SEQ ID NO: 1591 - DNA, 40 bp, Artificial Sequence
  Synthetic probe
ggttaatgagaaaccaaataaacagcctctgccccagctg

SEQ ID NO: 1592 - DNA, 29 bp, Artificial Sequence
  Synthetic probe
gtcctcccctcccctcgaggtgtcacaca

SEQ ID NO: 1593 - DNA, 34 bp, Artificial Sequence
  Synthetic probe
ccagccctgagccaccctcccgggaaaccccaca

SEQ ID NO: 1594 - DNA, 34 bp, Artificial Sequence; identical to SEQ ID NO: 309
  Synthetic probe

SEQ ID NO: 1595 - DNA, 29 bp, Artificial Sequence
  Synthetic probe
gcccgctgggccctgccacccccacccct

SEQ ID NO: 1596 - DNA, 31 bp, Artificial Sequence; identical to SEQ ID NO: 70
  Synthetic probe

SEQ ID NO: 1597 - DNA, 32 bp, Artificial Sequence
  Synthetic probe
agaggctactgggggaacaagactggcaagcc

SEQ ID NO: 1598 - DNA, 42 bp, Artificial Sequence; identical to SEQ ID NO: 73
  Synthetic probe

SEQ ID NO: 1599 - DNA, 29 bp, Artificial Sequence
  Synthetic probe
caagagccctgccccagcagcagccgcac

SEQ ID NO: 1600 - DNA, 32 bp, Artificial Sequence
  Synthetic probe
tcatggaaaccccacccttcccatgcccaacc

SEQ ID NO: 1601 - DNA, 34 bp, Artificial Sequence
  Synthetic probe
tagcctgaaaaaagatgcccccaccagccctgcc

SEQ ID NO: 1602 - DNA, 37 bp, Artificial Sequence
  Synthetic probe
ctcgggcccggccccctccgagctcaacaggctccca

SEQ ID NO: 1603 - DNA, 35 bp, Artificial Sequence
  Synthetic probe
cgcctaattagcccccctgctccggaggcctcacc

SEQ ID NO: 1604 - DNA, 29 bp, Artificial Sequence
  Synthetic probe
gcacacccgctctccggcccgcgcccctg

SEQ ID NO: 1605 - DNA, 38 bp, Artificial Sequence
  Synthetic probe
accccaatccttgttatgtaacctaccacctacccctt

SEQ ID NO: 1606 - DNA, 38 bp, Artificial Sequence
  Synthetic probe
ggagagaaaccccggccacttcccaccaccctggtggc

SEQ ID NO: 1607 - DNA, 34 bp, Artificial Sequence
  Synthetic probe
ctgcctctgccctgatcatcaaagccctcaagga

SEQ ID NO: 1608 - DNA, 34 bp, Artificial Sequence; identical to SEQ ID NO: 81
  Synthetic probe

SEQ ID NO: 1609 - DNA, 42 bp, Artificial Sequence; identical to SEQ ID NO: 159
  Synthetic probe

SEQ ID NO: 1610 - DNA, 34 bp, Artificial Sequence
  Synthetic probe
atccgggctgccaccgcgacatagcctcgccccc

SEQ ID NO: 1611 - DNA, 29 bp, Artificial Sequence
  Synthetic probe
agggttagagctgccccctctggggaccg

SEQ ID NO: 1612 - DNA, 30 bp, Artificial Sequence; identical to SEQ ID NO: 85
  Synthetic probe

SEQ ID NO: 1613 - DNA, 32 bp, Artificial Sequence; identical to SEQ ID NO: 86
  Synthetic probe

SEQ ID NO: 1614 - DNA, 29 bp, Artificial Sequence
  Synthetic probe
ttcaggccacaaagctacccccaagacag

SEQ ID NO: 1615 - DNA, 30 bp, Artificial Sequence
  Synthetic probe
cagggctaacagggctcccccacccctaag

SEQ ID NO: 1616 - DNA, 31 bp, Artificial Sequence
  Synthetic probe
atcacccttccccctcccaaataaagccaaa

SEQ ID NO: 1617 - DNA, 29 bp, Artificial Sequence
  Synthetic probe
gcctccgcctggcccgagcgataaagctc

SEQ ID NO: 1618 - DNA, 29 bp, Artificial Sequence
  Synthetic probe
cccagagaaccggaattcctccccgcccc

SEQ ID NO: 1619 - DNA, 33 bp, Artificial Sequence
  Synthetic probe
atccccaccacccaccagaaggcgacggtctcc

SEQ ID NO: 1620 - DNA, 34 bp, Artificial Sequence
  Synthetic probe
gagctccccagccagctccagttcgacctgcctt

SEQ ID NO: 1621 - DNA, 30 bp, Artificial Sequence
  Synthetic probe
agcctgtgcctgccgctgtctagtactggt

SEQ ID NO: 1622 - DNA, 30 bp, Artificial Sequence
  Synthetic probe
tgccagcttcatcgccgcctcacacacaca

SEQ ID NO: 1623 - DNA, 33 bp, Artificial Sequence
  Synthetic probe
gtcctcctccatcccatcccttccaccagccct

SEQ ID NO: 1624 - DNA, 44 bp, Artificial Sequence
  Synthetic probe
ctctcccctcccgccctctcaccctcccaaccttatttagaaac

SEQ ID NO: 1625 - DNA, 44 bp, Artificial Sequence
  Synthetic probe
ccagagcttctcaagggggactacaactcccaaggtacatacaa

SEQ ID NO: 1626 - DNA, 37 bp, Artificial Sequence
  Synthetic probe
gatgcgcgcgccgaccgccgccagctgcaattcatac

SEQ ID NO: 1627 - DNA, 33 bp, Artificial Sequence
  Synthetic probe
tgtcactcccctgccgctccctgggtgcaggct

SEQ ID NO: 1628 - DNA, 31 bp, Artificial Sequence; identical to SEQ ID NO: 98
  Synthetic probe

SEQ ID NO: 1629 - DNA, 42 bp, Artificial Sequence
  Synthetic probe
gggcaaaggtcacggggtccaaggccttaagcacctccgcca

SEQ ID NO: 1630 - DNA, 29 bp, Artificial Sequence
  Synthetic probe
ccattccccaccctcaggtagtaaaaata

SEQ ID NO: 1631 - DNA, 35 bp, Artificial Sequence
  Synthetic probe
tagagacccttataagctcagggccaccccctccc

SEQ ID NO: 1632 - DNA, 38 bp, Artificial Sequence
  Synthetic probe
tgattttcttcccacttcacctccctctgagctctcca

SEQ ID NO: 1633 - DNA, 31 bp, Artificial Sequence
  Synthetic probe
ccgacccgcccgtcagccgcctctccctcag

SEQ ID NO: 1634 - DNA, 28 bp, Artificial Sequence
  Synthetic probe
cagcccctccccagctgcagctgagggc

SEQ ID NO: 1635 - DNA, 38 bp, Artificial Sequence
  Synthetic probe
gatgctggcgtccgccgcagcctctcgccccatcccgg

SEQ ID NO: 1636 - DNA, 30 bp, Artificial Sequence
  Synthetic probe
tccttccaaacgcccaccctgggtcagctc

SEQ ID NO: 1637 - DNA, 31 bp, Artificial Sequence
  Synthetic probe
cctccccactcagtccccacacccccagcca

SEQ ID NO: 1638 - DNA, 33 bp, Artificial Sequence
  Synthetic probe
tggggcccccgccctgcccatctccgactatcc

SEQ ID NO: 1639 - DNA, 32 bp, Artificial Sequence
  Synthetic probe
accccagttgccaaacagacctcccaccccct

SEQ ID NO: 1640 - DNA, 28 bp, Artificial Sequence
  Synthetic probe
aggggctgggggaatcccagcaggggaa

SEQ ID NO: 1641 - DNA, 33 bp, Artificial Sequence
  Synthetic probe
cagccgaggcggacgcccgctcccgccaccatg

SEQ ID NO: 1642 - DNA, 28 bp, Artificial Sequence
  Synthetic probe
gaaacaaacacccaagctccccacacca

SEQ ID NO: 1643 - DNA, 31 bp, Artificial Sequence
  Synthetic probe
gtctgccctccctcttgatcaagactgctct

SEQ ID NO: 1644 - DNA, 30 bp, Artificial Sequence
  Synthetic probe
aggaaaagaaaccctcccagtccattccct

SEQ ID NO: 1645 - DNA, 31 bp, Artificial Sequence
  Synthetic probe
gaaagggttatccgcctggttgcggggctgc

SEQ ID NO: 1646 - DNA, 35 bp, Artificial Sequence
  Synthetic probe
cgctaaactgacgatccccgccgtgactaaagcca

SEQ ID NO: 1647 - DNA, 28 bp, Artificial Sequence
  Synthetic probe
tctcattagccagccactcgctcccaag

SEQ ID NO: 1648 - DNA, 29 bp, Artificial Sequence
  Synthetic probe
gatattcagagccctccccagcccacaca

SEQ ID NO: 1649 - DNA, 33 bp, Artificial Sequence
  Synthetic probe
tcacacattcttccacagagggaaatcagggga

SEQ ID NO: 1650 - DNA, 32 bp, Artificial Sequence
  Synthetic probe
aaaccagctagcaaaccgctccgtccgtattg

SEQ ID NO: 1651 - DNA, 35 bp, Artificial Sequence; identical to SEQ ID NO: 122
  Synthetic probe

SEQ ID NO: 1652 - DNA, 32 bp, Artificial Sequence
  Synthetic probe
gccgcccgccgggcaccgggccgggcctgggc

SEQ ID NO: 1653 - DNA, 38 bp, Artificial Sequence
  Synthetic probe
gcccccaagtgaaaaacagagcaaaactcatttcctga

SEQ ID NO: 1654 - DNA, 33 bp, Artificial Sequence
  Synthetic probe
catttcatccgcatctccctcttggccccttgc

SEQ ID NO: 1655 - DNA, 27 bp, Artificial Sequence
  Synthetic probe
cacctgttgccaaccccagccctataa

SEQ ID NO: 1656 - DNA, 33 bp, Artificial Sequence; identical to SEQ ID NO: 130
  Synthetic probe

SEQ ID NO: 1657 - DNA, 32 bp, Artificial Sequence; identical to SEQ ID NO: 343
  Synthetic probe

SEQ ID NO: 1658 - DNA, 32 bp, Artificial Sequence
  Synthetic probe
taggagaggggctccattgccagccccagccc

SEQ ID NO: 1659 - DNA, 60 bp, Artificial Sequence; identical to SEQ ID NO: 162
  Synthetic probe

SEQ ID NO: 1660 - DNA, 22 bp, Artificial Sequence
  Synthetic probe
tgaggtagtaggttgtgtggtt

SEQ ID NO: 1661 - DNA, 22 bp, Artificial Sequence
  Synthetic probe
tgaggtagtaggttgtatggtt

SEQ ID NO: 1662 - DNA, 22 bp, Artificial Sequence
  Synthetic probe
tgaggtaggaggttgtatagtt

SEQ ID NO: 1663 - DNA, 22 bp, Artificial Sequence
  Synthetic probe
aacccgtagatccgaacttgtg

SEQ ID NO: 1664 - DNA, 21 bp, Artificial Sequence
  Synthetic probe
tacagtactgtgataactgaa

SEQ ID NO: 1665 - DNA, 23 bp, Artificial Sequence
  Synthetic probe
gagggtcttgggagggatgtgac

SEQ ID NO: 1666 - DNA, 21 bp, Artificial Sequence
  Synthetic probe
tggcagggaggctgggagggg

SEQ ID NO: 1667 - DNA, 19 bp, Artificial Sequence
  Synthetic probe
gtgaggactcgggaggtgg

SEQ ID NO: 1668 - DNA, 22 bp, Artificial Sequence
  Synthetic probe
gtgggtacggcccagtgggggg

SEQ ID NO: 1669 - DNA, 21 bp, Artificial Sequence
  Synthetic probe
gtgggcgggggcaggtgtgtg

SEQ ID NO: 1670 - DNA, 22 bp, Artificial Sequence
  Synthetic probe
tcggcctgaccacccaccccac

SEQ ID NO: 1671 - DNA, 24 bp, Artificial Sequence
  Synthetic probe
tccctgagaccctttaacctgtga

SEQ ID NO: 1672 - DNA, 22 bp, Artificial Sequence
  Synthetic probe
tcgtaccgtgagtaataatgcg

SEQ ID NO: 1673 - DNA, 18 bp, Artificial Sequence
  Synthetic probe
cgggcgtggtggtggggg

SEQ ID NO: 1674 - DNA, 22 bp, Artificial Sequence
  Synthetic probe
cagtgcaatgatgaaagggcat

SEQ ID NO: 1675 - DNA, 21 bp, Artificial Sequence
  Synthetic probe
taccacagggtagaaccacgg

SEQ ID NO: 1676 - DNA, 23 bp, Artificial Sequence
  Synthetic probe
gtccagttttcccaggaatccct

SEQ ID NO: 1677 - DNA, 21 bp, Artificial Sequence
  Synthetic probe
agggagggacgggggctgtgc

SEQ ID NO: 1678 - DNA, 22 bp, Artificial Sequence
  Synthetic probe
tctcccaacccttgtaccagtg

SEQ ID NO: 1679 - DNA, 23 bp, Artificial Sequence
  Synthetic probe
aacattcattgctgtcggtgggt

SEQ ID NO: 1680 - DNA, 23 bp, Artificial Sequence
  Synthetic probe
aacattcattgttgtcggtgggt

SEQ ID NO: 1681 - DNA, 22 bp, Artificial Sequence
  Synthetic probe
aggggctggctttcctctggtc

SEQ ID NO: 1682 - DNA, 22 bp, Artificial Sequence
  Synthetic probe
acagcaggcacagacaggcagt

SEQ ID NO: 1683 - DNA, 22 bp, Artificial Sequence
  Synthetic probe
ggggttcctggggatgggattt

SEQ ID NO: 1684 - DNA, 22 bp, Artificial Sequence
  Synthetic probe
tgtaaacatcctcgactggaag

SEQ ID NO: 1685 - DNA, 22 bp, Artificial Sequence
  Synthetic probe
tgtaaacatccccgactggaag

SEQ ID NO: 1686 - DNA, 22 bp, Artificial Sequence
  Synthetic probe
aaaagctgggttgagagggcga

SEQ ID NO: 1687 - DNA, 22 bp, Artificial Sequence
  Synthetic probe
aaaagctgggttgagagggcaa

SEQ ID NO: 1688 - DNA, 23 bp, Artificial Sequence
  Synthetic probe
tcaagagcaataacgaaaaatgt

SEQ ID NO: 1689 - DNA, 22 bp, Artificial Sequence
  Synthetic probe
tggcagtgtcttagctggttgt

SEQ ID NO: 1690 - DNA, 23 bp, Artificial Sequence
  Synthetic probe
taggcagtgtcattagctgattg

SEQ ID NO: 1691 - DNA, 23 bp, Artificial Sequence
  Synthetic probe
aggcagtgtagttagctgattgc

SEQ ID NO: 1692 - DNA, 20 bp, Artificial Sequence
  Synthetic probe
actcaaactgtgggggcact

SEQ ID NO: 1693 - DNA, 22 bp, Artificial Sequence
  Synthetic probe
actcaaaatgggggcgctttcc

SEQ ID NO: 1694 - DNA, 22 bp, Artificial Sequence
  Synthetic probe
aaaccgttaccattactgagtt

SEQ ID NO: 1695 - DNA, 21 bp, Artificial Sequence
  Synthetic probe
cggggcagctcagtacaggat

SEQ ID NO: 1696 - DNA, 22 bp, Artificial Sequence
  Synthetic probe
cttatgcaagattcccttctac

SEQ ID NO: 1697 - DNA, 23 bp, Artificial Sequence
  Synthetic probe
tttcaagccagggggcgtttttc

SEQ ID NO: 1698 - DNA, 23 bp, Artificial Sequence
  Synthetic probe
gtttgcacgggtgggccttgtct

SEQ ID NO: 1699 - DNA, 25 bp, Artificial Sequence
  Synthetic probe
agggatcgcgggcgggtggcggcct

SEQ ID NO: 1700 - DNA, 22 bp, Artificial Sequence
  Synthetic probe
aggcggggcgccgcgggaccgc

SEQ ID NO: 1701 - DNA, 23 bp, Artificial Sequence
  Synthetic probe
aggaagccctggaggggctggag

SEQ ID NO: 1702 - DNA, 22 bp, Artificial Sequence
  Synthetic probe
tgcggggctagggctaacagca

SEQ ID NO: 1703 - DNA, 22 bp, Artificial Sequence
  Synthetic probe
aggcagcggggtgtagtggata

SEQ ID NO: 1704 - DNA, 22 bp, Artificial Sequence
  Synthetic probe
gggtggggatttgttgcattac

SEQ ID NO: 1705 - DNA, 22 bp, Artificial Sequence
  Synthetic probe
agggacgggacgcggtgcagtg

SEQ ID NO: 1706 - DNA, 22 bp, Artificial Sequence
  Synthetic probe
tgaggtagtaagttgtattgtt

SEQ ID NO: 1707 - DNA, 22 bp, Artificial Sequence
  Synthetic probe
aacccgtagatccgatcttgtg

SEQ ID NO: 1708 - DNA, 123 bp, Homo sapiens; identical to SEQ ID NO: 551
  misc_feature (1)..(123): Pre-microRNA sequence

SEQ ID NO: 1709 - DNA, 78 bp, Homo sapiens; identical to SEQ ID NO: 552
  misc_feature (1)..(78): Pre-microRNA sequence

SEQ ID NO: 1710 - DNA, 89 bp, Homo sapiens; identical to SEQ ID NO: 503
  misc_feature (1)..(89): Pre-microRNA sequence

SEQ ID NO: 1711 - DNA, 78 bp, Homo sapiens; identical to SEQ ID NO: 529
  misc_feature (1)..(78): Pre-microRNA sequence

SEQ ID NO: 1712 - DNA, 80 bp, Homo sapiens; identical to SEQ ID NO: 531
  misc_feature (1)..(80): Pre-microRNA sequence

SEQ ID NO: 1713 - DNA, 87 bp, Homo sapiens; identical to SEQ ID NO: 534
  misc_feature (1)..(87): Pre-microRNA sequence

SEQ ID NO: 1714 - DNA, 76 bp, Homo sapiens; identical to SEQ ID NO: 649
  misc_feature (1)..(76): Pre-microRNA sequence

SEQ ID NO: 1715 - DNA, 72 bp, Homo sapiens; identical to SEQ ID NO: 536
  misc_feature (1)..(72): Pre-microRNA sequence

SEQ ID NO: 1716 - DNA, 72 bp, Homo sapiens; identical to SEQ ID NO: 538
  misc_feature (1)..(72): Pre-microRNA sequence

SEQ ID NO: 1717 - DNA, 81 bp, Homo sapiens
  misc_feature (1)..(81): Pre-microRNA sequence
accctcaagctctcaagtggtgaccaccgtccttccggccaggtaggactggatgggaggggtcgcttttgagagaagggt

SEQ ID NO: 1718 - DNA, 88 bp, Homo sapiens; identical to SEQ ID NO: 540
  misc_feature (1)..(88): Pre-microRNA sequence

SEQ ID NO: 1719 - DNA, 91 bp, Homo sapiens
  misc_feature (1)..(91): Pre-microRNA sequence
gaggctgcttaatgaggtgcccttttcaaaatgtcatcttaatcttttattagtttaagaaagacaacagggcacaattagcatgcaactc

SEQ ID NO: 1720 - DNA, 76 bp, Homo sapiens; identical to SEQ ID NO: 541
  misc_feature (1)..(76): Pre-microRNA sequence

SEQ ID NO: 1721 - DNA, 83 bp, Homo sapiens; identical to SEQ ID NO: 652
  misc_feature (1)..(83): Pre-microRNA sequence

SEQ ID NO: 1722 - DNA, 79 bp, Homo sapiens
  misc_feature (1)..(79): Pre-microRNA sequence
ccgccagctttgtagcggttcctgcttacaaaagggctcttcttggaaacggggctggtggggaccgtagagggggtgg

SEQ ID NO: 1723 - DNA, 101 bp, Homo sapiens
  misc_feature (1)..(101): Pre-microRNA sequence
ggcggctgacagcggtcatttgtcatcactgagctgcccaaactcctcagactgcactgcggatggctgcttagggtgacttatggccctgtcgggctgcc

SEQ ID NO: 1724 - DNA, 142 bp, Homo sapiens; identical to SEQ ID NO: 542
  misc_feature (1)..(142): Pre-microRNA sequence

SEQ ID NO: 1725 - DNA, 122 bp, Homo sapiens; identical to SEQ ID NO: 1221
  misc_feature (1)..(122): Pre-microRNA sequence

SEQ ID NO: 1726 - DNA, 95 bp, Homo sapiens; identical to SEQ ID NO: 543
  misc_feature (1)..(95): Pre-microRNA sequence

SEQ ID NO: 1727 - DNA, 95 bp, Homo sapiens; identical to SEQ ID NO: 543
  misc_feature (1)..(95): Pre-microRNA sequence

SEQ ID NO: 1728 - DNA, 93 bp, Homo sapiens
  misc_feature (1)..(93): Pre-microRNA sequence
ttgctactccatggggtggattttcatggcgacgccttgttatcttggttattgttgccataggactttccaaagcaccacatggtttggtaa

SEQ ID NO: 1729 - DNA, 78 bp, Homo sapiens
  misc_feature (1)..(78): Pre-microRNA sequence
ggtccactgtcagagagagatgtgccactgtgcactctctgagcagatgggcggcaatatggcacatttacatggacc

SEQ ID NO: 1730 - DNA, 65 bp, Homo sapiens
  misc_feature (1)..(65): Pre-microRNA sequence
cccacgcgtcgcgcgctcccgaccggagcgggacggggcctgtcgggggcgcgccaggggcgggg

SEQ ID NO: 1731 - DNA, 92 bp, Homo sapiens
  misc_feature (1)..(92): Pre-microRNA sequence
gcgcggtggccgggtgctggctgcggggccgggtcctcattctgctcagtccttgctgcccttgtcttctcctccccgccaagccgccgtgt

SEQ ID NO: 1732 - DNA, 119 bp, Homo sapiens; identical to SEQ ID NO: 545
  misc_feature (1)..(119): Pre-microRNA sequence

SEQ ID NO: 1733 - DNA, 69 bp, Homo sapiens; identical to SEQ ID NO: 546
  misc_feature (1)..(69): Pre-microRNA sequence

SEQ ID NO: 1734 - DNA, 73 bp, Homo sapiens; identical to SEQ ID NO: 548
  misc_feature (1)..(73): Pre-microRNA sequence

SEQ ID NO: 1735 - DNA, 87 bp, Homo sapiens
  misc_feature (1)..(87): Pre-microRNA sequence
cgggagcctcctttctgtcctctctactccgtgcgggcctgggccggcagaggtaggagggggcgcacaccgggccaggaggctgcc

SEQ ID NO: 1736 - DNA, 113 bp, Homo sapiens; identical to SEQ ID NO: 549
  misc_feature (1)..(113): Pre-microRNA sequence

SEQ ID NO: 1737 - DNA, 114 bp, Homo sapiens; identical to SEQ ID NO: 550
  misc_feature (1)..(114): Pre-microRNA sequence

SEQ ID NO: 1738 - DNA, 123 bp, Homo sapiens; identical to SEQ ID NO: 551
  misc_feature (1)..(123): Pre-microRNA sequence

SEQ ID NO: 1739 - DNA, 78 bp, Homo sapiens; identical to SEQ ID NO: 552
  misc_feature (1)..(78): Pre-microRNA sequence

SEQ ID NO: 1740 - DNA, 90 bp, Homo sapiens; identical to SEQ ID NO: 553
  misc_feature (1)..(90): Pre-microRNA sequence

SEQ ID NO: 1741 - DNA, 145 bp, Homo sapiens; identical to SEQ ID NO: 554
  misc_feature (1)..(145): Pre-microRNA sequence

SEQ ID NO: 1742 - DNA, 116 bp, Homo sapiens; identical to SEQ ID NO: 555
  misc_feature (1)..(116): Pre-microRNA sequence

SEQ ID NO: 1743 - DNA, 107 bp, Homo sapiens; identical to SEQ ID NO: 556
  misc_feature (1)..(107): Pre-microRNA sequence

SEQ ID NO: 1744 - DNA, 92 bp, Homo sapiens
  misc_feature (1)..(92): Pre-microRNA sequence
gcgcgccggggcgctggcggccggcgcggctgcagacgctgctagctcccgccggcgcccagctgccgccccggccgaagcgcccccgccgc

SEQ ID NO: 1745 - DNA, 104 bp, Homo sapiens
  misc_feature (1)..(104): Pre-microRNA sequence
gttcgcgtgaccctcagcgccctccccacccggcaggccctttcccgccgaatgggtgcggctggattattgagggagtggagggtcgcttagggcacgggcac

SEQ ID NO: 1746 - DNA, 126 bp, Homo sapiens
  misc_feature (1)..(126): Pre-microRNA sequence
ggcgtcctgcccatactgttgtccctgttttgggggcatgtgggagccaacacaggggagtcaggtgtgtggtaggcagtcaggtgtgttttggggtcagggaggcaggtttgggcctgggaggcc

SEQ ID NO: 1747 - DNA, 96 bp, Homo sapiens
  misc_feature (1)..(96): Pre-microRNA sequence
ggcccatggtcactccccagcaaatgacagctcagtggctataattaatgtcaaattggattttgtcatttcagtggggaaatggagctgtgggct

SEQ ID NO: 1748 - DNA, 108 bp, Homo sapiens
  misc_feature (1)..(108): Pre-microRNA sequence
ggcaggtggaaccagcatattctttattcaccaaagggaaaaggaggaggtgttcaggatgttacctcaatttccaggtctccctctcatgtgttggtttctcctgct

SEQ ID NO: 1749 - DNA, 113 bp, Homo sapiens
  misc_feature (1)..(113): Pre-microRNA sequence
caagtgaagagtgaaggtattagtaggtgggaaatgggggtggaagggagtcttgagctttatttgatccaattgtcactctatctactgcttaactttgcttccttttcttg

SEQ ID NO: 1750 - DNA, 95 bp, Homo sapiens
  misc_feature (1)..(95): Pre-microRNA sequence
aagtcatatagctattaagttgtagaggtgggttttgaatcagagctgaatctaaagttcaccttttctaaaacactctaaaagctaagtgattt

SEQ ID NO: 1751 - DNA, 124 bp, Homo sapiens; identical to SEQ ID NO: 1231
  misc_feature (1)..(124): Pre-microRNA sequence

SEQ ID NO: 1752 - DNA, 57 bp, Homo sapiens
  misc_feature (1)..(57): Pre-microRNA sequence
aggcgggagggatgttgtagactcctcactccatgagcatacagtattttctcgcct

SEQ ID NO: 1753 - DNA, 91 bp, Homo sapiens
  misc_feature (1)..(91): Pre-microRNA sequence
gggtgggggcaaccagaccaaggtgacatcattcccaaggggacactgaaggaaaactatgggagggtctgggttctgtctgtcttcaccc

SEQ ID NO: 1754 - DNA, 91 bp, Homo sapiens; identical to SEQ ID NO: 1753
  misc_feature (1)..(91): Pre-microRNA sequence

SEQ ID NO: 1755 - DNA, 68 bp, Homo sapiens
  misc_feature (1)..(68): Pre-microRNA sequence
taggccgaagtacctctccaaggttatttgagaggcgctgatagccttggcggtggcactggggcctg

SEQ ID NO: 1756 - DNA, 115 bp, Homo sapiens
  misc_feature (1)..(115): Pre-microRNA sequence
ccttgacttccctttcttctcacttcggactgctcacttgccttgttcagccctgaatcatcaggtgaagggagcgagaattgcgggggttggagttaggtagagggatttaagg

SEQ ID NO: 1757 - DNA, 106 bp, Homo sapiens
  misc_feature (1)..(106): Pre-microRNA sequence
acctcagtgttgatagcagatctcattatagtcggtgcatttggctaccgacctgcagccagcagtgcccggggctagtgcatggggtctgctgtgccactgtggt

SEQ ID NO: 1758 - DNA, 95 bp, Homo sapiens
  misc_feature (1)..(95): Pre-microRNA sequence
aggccgtccgcagacccaggtcaggggcgaaggcgcgctcgcccatccctggtcgtcactgcttggcttgcggggggtgggagataggggtgcgt

SEQ ID NO: 1759 - DNA, 136 bp, Homo sapiens
  misc_feature (1)..(136): Pre-microRNA sequence
ggttggcgggtgggggagatgcttaggtccggggaatctctgagattctcggcttcccctctcccctcaccctcctcctcaggccccaggcagccccggggcatgctgggaacccaggcctgggctccgggccagg

SEQ ID NO: 1760 - DNA, 117 bp, Homo sapiens
  misc_feature (1)..(117): Pre-microRNA sequence
cagccaccagagcagatgagctgtcacctttaaatcacaattctgaagctctggaagagagaatagaattggttcaactagatttgggggctacctccatctgctcaagtttggctg

SEQ ID NO: 1761 - DNA, 89 bp, Homo sapiens
  misc_feature (1)..(89): Pre-microRNA sequence
ggaggatactggtgggggctatacgtttggtgaaatccatcagtgatattcaagccaagcaaataatcacccactaatttgtgttttcc

SEQ ID NO: 1762 - DNA, 55 bp, Homo sapiens
  misc_feature (1)..(55): Pre-microRNA sequence
agagggctgggctggacttcagctttcacctaggaaatgagtcttgctgcccttt

SEQ ID NO: 1763 - DNA, 87 bp, Homo sapiens
  misc_feature (1)..(87): Pre-microRNA sequence
cactagcccagggcttggagtggggcaaggttgttggtgatatggcttcctctcccttcctgccctggctaggccctggagcgactg

SEQ ID NO: 1764 - DNA, 89 bp, Homo sapiens
  misc_feature (1)..(89): Pre-microRNA sequence
tgcagcctgggcctgctgaacacttgagggtcgggggttctcaggaaatccctgagagctcaaaggatggcctgaggggcctggtggca

SEQ ID NO: 1765 - DNA, 78 bp, Homo sapiens
  misc_feature (1)..(78): Pre-microRNA sequence
ctgacttctgcgcggggcgcggtggggttctgcggggtcggaaagactccccagatccccgcgcggccccagacccag

SEQ ID NO: 1766 - DNA, 90 bp, Homo sapiens
  misc_feature (1)..(90): Pre-microRNA sequence
gggcagggcagcttcacctggctctgcagctcctgagcctgggtgggctaacctgggccaggagtagggaggtgggtcctgccactgccc

SEQ ID NO: 1767 - DNA, 78 bp, Homo sapiens
  misc_feature (1)..(78): Pre-microRNA sequence
gtggacaaccctagggtggggctggaggtggggctgaggctgagtcttcctccccttcctccctgcccaggggtccac

SEQ ID NO: 1768 - DNA, 99 bp, Homo sapiens
  misc_feature (1)..(99): Pre-microRNA sequence
agttgggggtccaggaggctccagggtgagcccactcctccccctagatacaagggagggccctgggaccctgtctgctgttcctcctggactcctgct

SEQ ID NO: 1769 - DNA, 115 bp, Homo sapiens
  misc_feature (1)..(115): Pre-microRNA sequence
agggaaaggcaagggtagccattgtttgggttggggtggtcggccctggagggggtttgtttgcttattcccctctgtgcttcacccctacccagcttcccgccagaaagccctg

SEQ ID NO: 1770 - DNA, 97 bp, Homo sapiens
  misc_feature (1)..(97): Pre-microRNA sequence
ggcaagggtagccattgtttgggttggggtggtcggccctggagggggtttgtttgcttattcccctctgtgcttcacccctacccagcttcccgcc

SEQ ID NO: 1771 - DNA, 115 bp, Homo sapiens
  misc_feature (1)..(115): Pre-microRNA sequence
tctccgtgcacgctgctgaccggctcggcgactgcctccctgctgtgagcaggagaacaggaagtctgcccgacagggaggtggccgggcgggagcggcagagtcggcgttgaga

SEQ ID NO: 1772 - DNA, 91 bp, Homo sapiens
  misc_feature (1)..(91): Pre-microRNA sequence
tgaggggtaagtttaggctttcgcggaggggaggagacatggagcctgggaactccttgttctcccctctgctgcctctccccacccctta

SEQ ID NO: 1773 - DNA, 84 bp, Homo sapiens
  misc_feature (1)..(84): Pre-microRNA sequence
tggcgctgctctgctgttcctctgtctcccagactctgggtggatggagcaggtcgggggccaggggacaggaaggctagggcc

SEQ ID NO: 1774 - DNA, 105 bp, Homo sapiens
  misc_feature (1)..(105): Pre-microRNA sequence
ccagactctgggtggatggagcaggtcgggggccaggggacaggaaggctagggccccagagacctgtcctgggccccatgtccagctctgcccttagtgcttgg

SEQ ID NO: 1775 - DNA, 113 bp, Homo sapiens
  misc_feature (1)..(113): Pre-microRNA sequence
ccaagcagcttatcgaggaaaagatcgaggtgggttggggcgggctctggggatttggtctcacagcccggatcccagcccacttaccttggttactctccttccttctaggg

SEQ ID NO: 1776 - DNA, 89 bp, Homo sapiens
  misc_feature (1)..(89): Pre-microRNA sequence
gaggaaaagatcgaggtgggttggggcgggctctggggatttggtctcacagcccggatcccagcccacttaccttggttactctcctt

SEQ ID NO: 1777 - DNA, 115 bp, Homo sapiens
  misc_feature (1)..(115): Pre-microRNA sequence
catgagtctgcacctccaggcaggctctgtgcagtactcaccccctccgtctgctccctccaaggtgtgggggtgggcagtgctcagggcctcctcggagccaaaggacagcatg

SEQ ID NO: 1778 - DNA, 108 bp, Homo sapiens
  misc_feature (1)..(108): Pre-microRNA sequence
gaggagggagccccccatagggtggccctgaccagggctggcaggggcaagtgtggacgcccggccccttgcccaggctgggaccactctgagggacaactcatcctt

SEQ ID NO: 1779 - DNA, 108 bp, Homo sapiens
  misc_feature (1)..(108): Pre-microRNA sequence
ggcatggggaggtggggttgcgggggttagagctgtgggtgatcagaagggaagggcttcatttctacgctctgcctccgctacctcttccccaccacccctaatccc

SEQ ID NO: 1780 - DNA, 96 bp, Homo sapiens
  misc_feature (1)..(96): Pre-microRNA sequence
atccgtcgcagcagtcgctgcagccgctgcagtccgagccgactaagggcgggaggcagctcgggtggcggggcgtggcgaacagcgcggccggat

SEQ ID NO: 1781 - DNA, 127 bp, Homo sapiens
  misc_feature (1)..(127): Pre-microRNA sequence
gctgggatctccggggtcttggttcagggccggggcctctgggttccaagcaccagtgaggagagtgctgggaggggaaggggtgggagggctttggtcttgtgggagggagagaaggaggggaggt

SEQ ID NO: 1782 - DNA, 116 bp, Homo sapiens
  misc_feature (1)..(116): Pre-microRNA sequence
ggtatcctgagagtttattagatgtttgttttcattccttttgcaatggcctatggtatattatgtatcaacatttaatgtgatgaaaacgtctcacttatattcttcaggatact

SEQ ID NO: 1783 - DNA, 66 bp, Homo sapiens
  misc_feature (1)..(66): Pre-microRNA sequence
gcctcgcggggtgggtcggggggtcctctgacgcggcaggcacccctcgctctcgcctcctgtggt

SEQ ID NO: 1784 - DNA, 95 bp, Homo sapiens
  misc_feature (1)..(95): Pre-microRNA sequence
tcctgaaagaggttggggcaggcagtgactgttcagacgtccaatctctttgggacgcctcttcagcgctgtcttccctgcctctgcctttagga

SEQ ID NO: 1785 - DNA, 81 bp, Homo sapiens
  misc_feature (1)..(81): Pre-microRNA sequence
cattaggtggtgggtttttggtttattttttgctttttcaatatggaaaatagcttgtggactatcactaacacctctgtg

SEQ ID NO: 1786 - DNA, 97 bp, Homo sapiens
  misc_feature (1)..(97): Pre-microRNA sequence
gcatgcacagtcatttttgtttaagagtaatatttttaatgtaatagattgtaagacgtggtgagggagggatctgacagagatgaatgtgccaagc

SEQ ID NO: 1787 - DNA, 100 bp, Homo sapiens
  misc_feature (1)..(100): Pre-microRNA sequence
aaaaaaaaaaaagatactaatacaaatggtcatggagggggaatatagagaagatcaattttgtacagaaaaaccattggttagtatttttttttctttt

SEQ ID NO: 1788 - DNA, 84 bp, Homo sapiens
  misc_feature (1)..(84): Pre-microRNA sequence
aggtgctgggagaagctgccagtgtttctcaacatgtctgcctccctgggaggtgaagcatgggcagaatcccccagcttccca

SEQ ID NO: 1789 - DNA, 119 bp, Homo sapiens
  misc_feature (1)..(119): Pre-microRNA sequence
tggtggggcttctcagaggaggtggcaggagacccgagcctgccaaggttgcacctaaggtcacgggcagcattaggagggctctctcccagtctccccacccccccatcccccctccc

SEQ ID NO: 1790 - DNA, 119 bp, Homo sapiens; identical to SEQ ID NO: 1789
  misc_feature (1)..(119): Pre-microRNA sequence

SEQ ID NO: 1791 - DNA, 121 bp, Homo sapiens
  misc_feature (1)..(121): Pre-microRNA sequence
gggagccgccggcgggcaggccgccggggcagcaggcgagttacctcaactcccggccgctccggaggttgccgggcaccgaggagccgccgtgcccttcaggcgcctgcggcggcgacca

SEQ ID NO: 1792 - DNA, 121 bp, Homo sapiens; identical to SEQ ID NO: 1791
  misc_feature (1)..(121): Pre-microRNA sequence

SEQ ID NO: 1793 - DNA, 112 bp, Homo sapiens
  misc_feature (1)..(112): Pre-microRNA sequence
gcgcctccggtcggtcagagagcggcggggcgcgtctgcagccctccaagccgcctcctgcgcgccgggtccccgcgcccgctgctgctgctgctgcccgccgcctgcgtgc

SEQ ID NO: 1794 - DNA, 102 bp, Homo sapiens
  misc_feature (1)..(102): Pre-microRNA sequence
ccagacccaaactaggttgagtgaggaaggggcagtggcagctacaggaatagcctgtgatgcctctgtccctctgaagatgtcccaatgtcccgtggcctg

SEQ ID NO: 1795 - DNA, 99 bp, Homo sapiens
  misc_feature (1)..(99): Pre-microRNA sequence
tgctggcccaaggggtaaaggggcagggacgggtggccccaggaagaagggcctggtggagccgctcttctccctgcccacagagactggcggagctgc

SEQ ID NO: 1796 - DNA, 119 bp, Homo sapiens
  misc_feature (1)..(119): Pre-microRNA sequence
agctttgtgttcgtaatggctcagttcaggtggttggagctggaggcactggagctaagactgtgggctcagggcctcaagtccctagaatcacaccacacttccaaatcattaagctc

SEQ ID NO: 1797 - DNA, 110 bp, Homo sapiens
  misc_feature (1)..(110): Pre-microRNA sequence
aggaacaggacgatgatgctggcgtcggtgctggggagcggcccccgggtgggcctctgctctggcccctcctggggcccgcactctcgctctgggcccgctcctcttcc

SEQ ID NO: 1798 - DNA, 115 bp, Homo sapiens; identical to SEQ ID NO: 1769
  misc_feature (1)..(115): Pre-microRNA sequence

SEQ ID NO: 1799 - DNA, 97 bp, Homo sapiens; identical to SEQ ID NO: 1770
  misc_feature (1)..(97): Pre-microRNA sequence

SEQ ID NO: 1800 - DNA, 90 bp, Homo sapiens
  misc_feature (1)..(90): Pre-microRNA sequence
ctgaggacaggggtaagtctggggagatggggggagctctgctgagggtgcacaaggccctggctctacacacatccctgtcttacagag

SEQ ID NO: 1801 - DNA, 108 bp, Homo sapiens
  misc_feature (1)..(108): Pre-microRNA sequence
gcagtgtgatttggggccgggaatgccgcggcggggacggcgattggtccgtatgtgtggtgccaccggccgccggctccgccccggcccccgccccacacgccgcat

SEQ ID NO: 1802 - DNA, 108 bp, Homo sapiens
  misc_feature (1)..(108): Pre-microRNA sequence
ctctgttaccttgcttgctctgtgtggttttggaggggtgtggaaagaggcagaacattcgttcactttcctgccttcctctgcaccagctaaaaagtttgcagagac

SEQ ID NO: 1803 - DNA, 121 bp, Homo sapiens
  misc_feature (1)..(121): Pre-microRNA sequence
ggctgggaccacctccttgtgccccctcctctgccatggcacctggctgtcacctgcctgacctcagccagggaccagccatggcagaggagggggcacaaggaggtggtccaaaggccca

SEQ ID NO: 1804 - DNA, 99 bp, Homo sapiens
  misc_feature (1)..(99): Pre-microRNA sequence
caggtatgctctgtgacaagatttgcagcattttagagagcccctggcctgctggggtggggacagatacagtggtaattctggcagaagatgaggcct

SEQ ID NO: 1805 - DNA, 99 bp, Homo sapiens
  misc_feature (1)..(99): Pre-microRNA sequence
caccataggtgaggtgggggccagcagggagtgggctgggctgggctgggccaaggtacaaggcctcaccctgcatcccgcacccaggcttcaacgtgg

SEQ ID NO: 1806 - DNA, 121 bp, Homo sapiens
  misc_feature (1)..(121): Pre-microRNA sequence
gccgcccccaccctgtccctcgtcacttcctctgtcctgtggggtgggggtgcaggcgcttctcctttagctgtgccgcacttctccctacaggccaggagaaacagaacaccgtgtgcac

SEQ ID NO: 1807 - DNA, 106 bp, Homo sapiens
  misc_feature (1)..(106): Pre-microRNA sequence
gggcacgggggttgggtgtgcaaagggtggcagcaaggaaggcaggggtcctaaggtgtgtcctcctgccctccttgctgtagactttggcctgagcaaagaggcc

SEQ ID NO: 1808 - DNA, 121 bp, Homo sapiens
  misc_feature (1)..(121): Pre-microRNA sequence
ctgggggtgaccccgtgcaggggctgagctgggcggctgggtgcatagcccatctgtagcctaagcaatggtgcaaagcccccacgccttggtttcctctcctgaacgcgggcacacagag

SEQ ID NO: 1809 - DNA, 119 bp, Homo sapiens
  misc_feature (1)..(119): Pre-microRNA sequence
tccgccgaataactccatgtgggtcttgggaggagggtggggtggctcctctgcagtgagtaggtctgcctggagctactccaccatctcccccagcccctgtatggctgggaggggaa

SEQ ID NO: 1810 - DNA, 108 bp, Homo sapiens
  misc_feature (1)..(108): Pre-microRNA sequence
cgggagggaaggagggaggaaggggcgcttgggcagaaccaagggtggcagattatcctagggactcttggggcagaaccagacgcctctgcgtcctcccctctcccc

SEQ ID NO: 1811 - DNA, 72 bp, Homo sapiens
  misc_feature (1)..(72): Pre-microRNA sequence
gtggcgagccaaggggcggaggcctggccaggcagaggctccgaggccagccaggcctcctaaccctccacc

SEQ ID NO: 1812 - DNA, 119 bp, Homo sapiens
  misc_feature (1)..(119): Pre-microRNA sequence
gtactccctcacagctgcatttcagtgcctggctctgacctggccacagcacacaccattgctaagtgtggggctgtggggaggctgaagccctgcacccactccaggctgaaggcagt

SEQ ID NO: 1813 - DNA, 117 bp, Homo sapiens
  misc_feature (1)..(117): Pre-microRNA sequence
tgggaagagggacatcgtggaaagttgtggcaactgggttcaggggaggccaggagcctgccagctgtggcctctaaaaaaataaaacccaggtgctcactggccctgccttcccac

SEQ ID NO: 1814 - DNA, 119 bp, Homo sapiens
  misc_feature (1)..(119): Pre-microRNA sequence
gtggagaggtggaggtggatgggctgatgtgagtgtgtgtgtgtagacagcctttctgacaaacaaggctgtattcaccaaggatctcctggcgggtatctcaaattccatcattcatc

SEQ ID NO: 1815 - DNA, 94 bp, Homo sapiens
  misc_feature (1)..(94): Pre-microRNA sequence
ttttggtaatttagactggaaatggcaatggtaattcagaaaaagaaataaattttaattattggtggtggtagtggcaatggattttcaaaga

SEQ ID NO: 1816 - DNA, 91 bp, Homo sapiens
  misc_feature (1)..(91): Pre-microRNA sequence
gtgagtggggctgggctgtgggggaggggtggggtggcagggaacaggcagaccatcccttctacccacaggatcctgctgctgcagacag

SEQ ID NO: 1817 - DNA, 92 bp, Homo sapiens
  misc_feature (1)..(92): Pre-microRNA sequence
ctgattagggttagtgggagggacacggcatgggagacagggagatttgcctgttgccctgagcctgactgagcttcctttctccctagcac

SEQ ID NO: 1818 - DNA, 114 bp, Homo sapiens
  misc_feature (1)..(114): Pre-microRNA sequence
gctcaatgcctccaacgcagtcagctgggtctcagccacgtacaacctcacggtggaggagcccatcgtgggcctggtgctgtgggccagcagcaaggtggtggcgcccgggca

SEQ ID NO: 1819 - DNA, 118 bp, Homo sapiens
  misc_feature (1)..(118): Pre-microRNA sequence
atccggctcaatgcctccaacgcagtcagctgggtctcagccacgtacaacctcacggtggaggagcccatcgtgggcctggtgctgtgggccagcagcaaggtggtggcgcccgggc

SEQ ID NO: 1820 - DNA, 121 bp, Homo sapiens
  misc_feature (1)..(121): Pre-microRNA sequence
tgccatcgaagggcgggtggggggaagccggaatctctgtccacatgctccaggcacctagctgctctgaggggcagagagcagaggtggtgctcccccccatcagcattttgagttggct

SEQ ID NO: 1821 - DNA, 108 bp, Homo sapiens
  misc_feature (1)..(108): Pre-microRNA sequence
agcttgtatcacctgccacttgcacctgtatcacacctgtgtgttacacctgtcactcctgtgtgtcactcttgtgtgttgcagatgtgggggcaggtgagcatctgc

SEQ ID NO: 1822 - DNA, 65 bp, Homo sapiens
  misc_feature (1)..(65): Pre-microRNA sequence
ttgggagggaagacagctggagagtatggtcacagcagcatcctcctctgttttctttcctagat

SEQ ID NO: 1823 - DNA, 63 bp, Homo sapiens
  misc_feature (1)..(63): Pre-microRNA sequence
ttgggagggaagacagctggagagtatggtcacagcagcatcctcctctgttttctttcctag

SEQ ID NO: 1824 - DNA, 86 bp, Homo sapiens
  misc_feature (1)..(86): Pre-microRNA sequence
tggggcagacagggcacagtgggaggggaggggagtcctgccaggagggccacctggtgactccacatcctttctcaccccccaga

SEQ ID NO: 1825 - DNA, 105 bp, Homo sapiens
  misc_feature (1)..(105): Pre-microRNA sequence
tggctgggagaggagcataggatgcggcaggagggcagtggaggctgaggtacggatttctaggcccgccctaccctcctctctgcccctagtgcccgtggccaa

SEQ ID NO: 1826 - DNA, 85 bp, Homo sapiens
  misc_feature (1)..(85): Pre-microRNA sequence
atcacgggttccatgttgggggagggaatgtcagaaaaagaatgtccgttcaacattccctctccacccttaaatctctatgtga

SEQ ID NO: 1827 - DNA, 113 bp, Homo sapiens
  misc_feature (1)..(113): Pre-microRNA sequence
gcggcggacaccatcttctttaaaccctcagtccgtattggtctctatggcatccatagaggccattcggctctgaggtcctcagtaaagaaacttagatggtattactgtgt

SEQ ID NO: 1828 - DNA, 118 bp, Homo sapiens
  misc_feature (1)..(118): Pre-microRNA sequence
tgagggggaggggcgctgcgggaggggtggagggcccagggaagggtgaggggccgggagccactctgcccggcactctccgcccagaaacagcccaacgcccctttctttccccttt

SEQ ID NO: 1829 - DNA, 118 bp, Homo sapiens
  misc_feature (1)..(118): Pre-microRNA sequence
agaggaaggaggcggctgggatagcccacacaggtggtgggagtctgtcctctccctgccagggtgcaggacagcaggtctcaatctcgcccagtgggactcagtggtccctcattca

SEQ ID NO: 1830 - DNA, 113 bp, Homo sapiens
  misc_feature (1)..(113): Pre-microRNA sequence
acaggcctggatttcagagggcgaacatttctgtggccgaagctcccagtgcgtttgcagtccttggagacggccgcagacacatttgttcttggcctgtctccaggtctgta

SEQ ID NO: 1831 - DNA, 101 bp, Homo sapiens
  misc_feature (1)..(101): Pre-microRNA sequence
actgagggggttccaggagctttgtggggcagcattgggagtgtgaacccccatccaggttctcacctctcaaacttcctcagatgctgagccccacttat

SEQ ID NO: 1832 - DNA, 91 bp, Homo sapiens
  misc_feature (1)..(91): Pre-microRNA sequence
gtttcccattcacactgcaggaaaggataggggtgggtgtggtcagaggaccctcacatggctccactctagaagctggcatgggcagctc

SEQ ID NO: 1833 - DNA, 104 bp, Homo sapiens
  misc_feature (1)..(104): Pre-microRNA sequence
tggtgagcaccgtgctgggtggcagggaggccaggggcccacctagtgccacctttccgtgactcctgctgtctccctgcagcccgtcggggatgagagccagg

SEQ ID NO: 1834 - DNA, 95 bp, Homo sapiens
  misc_feature (1)..(95): Pre-microRNA sequence
cggccagtgacttccccaggagtgtggagggggtggtgaggaggagcacctgggctctctacccctctcctcacagaagtacctgaaactaggtc

SEQ ID NO: 1835 - DNA, 114 bp, Homo sapiens
  misc_feature (1)..(114): Pre-microRNA sequence
gtgtgcagggctggggtcactgactctgcttcccctgccctgcatggtgtccccacagggacagcatggacagtgtcaagcagagtgcggccctgtgcctccttcgactgtaca

SEQ ID NO: 1836 - DNA, 97 bp, Homo sapiens
  misc_feature (1)..(97): Pre-microRNA sequence
agtcgggtgggatgtgagggtgtcagcaggtgacggtgggggccacgctgacagccgcacctgcctctcacccacagtgcaaccagagacccctcta

SEQ ID NO: 1837 - DNA, 86 bp, Homo sapiens
  misc_feature (1)..(86): Pre-microRNA sequence
aggtggaatgggctgaggctcaggaagggtcctgggatacaaatgctcactctatgggtctctccctgagcaggacattggttacc

SEQ ID NO: 1838 - DNA, 113 bp, Homo sapiens; identical to SEQ ID NO: 1775
  misc_feature (1)..(113): Pre-microRNA sequence

SEQ ID NO: 1839 - DNA, 89 bp, Homo sapiens; identical to SEQ ID NO: 1776
  misc_feature (1)..(89): Pre-microRNA sequence

SEQ ID NO: 1840 - DNA, 99 bp, Homo sapiens
  misc_feature (1)..(99): Pre-microRNA sequence
taccgcaagtatgtggagcagaggtgagggtggggcatgcatgtggttaagccaccaaccccaccagacctttccgccacactctcatcctgcaggtac

SEQ ID NO: 1841 - DNA, 115 bp, Homo sapiens; identical to SEQ ID NO: 1257
  misc_feature (1)..(115): Pre-microRNA sequence

SEQ ID NO: 1842 - DNA, 84 bp, Homo sapiens; identical to SEQ ID NO: 1773
  misc_feature (1)..(84): Pre-microRNA sequence

SEQ ID NO: 1843 - DNA, 105 bp, Homo sapiens; identical to SEQ ID NO: 1774
  misc_feature (1)..(105): Pre-microRNA sequence

SEQ ID NO: 1844 - DNA, 117 bp, Homo sapiens; identical to SEQ ID NO: 1258
  misc_feature (1)..(117): Pre-microRNA sequence

SEQ ID NO: 1845 - DNA, 69 bp, Homo sapiens
  misc_feature (1)..(69): Pre-microRNA sequence
ccagagaggaaagctgcaggtgctgatgttggggggacattcagactacctgcagcagagcccatggct

SEQ ID NO: 1846 - DNA, 88 bp, Homo sapiens
  misc_feature (1)..(88): Pre-microRNA sequence
taatctccagtgaaaaataagcatgagtgtgaggctgaaaaggctggaatcattctcctgcgtgtgcattcttccggggctgggagtt

SEQ ID NO: 1847 - DNA, 60 bp, Homo sapiens
  misc_feature (1)..(60): Pre-microRNA sequence
actgtaggtggcgccggaggagtcatttcccatcactaatggcttctcttgcacacccag

SEQ ID NO: 1848 - DNA, 110 bp, Homo sapiens
  misc_feature (1)..(110): Pre-microRNA sequence
gggacagcggtaaggagcccgagtggggcggggcaggtccctgcagggactgtgacactgaaggacctgcaccttcgcccacagaaagactcctagccaggagggcctgc

SEQ ID NO: 1849 - DNA, 81 bp, Homo sapiens
  misc_feature (1)..(81): Pre-microRNA sequence
accaggtgggcctggccccaggttggggggacacgggtgggtcccggcacccctcccctgaccaccgtgcctctcccagga

SEQ ID NO: 1850 - DNA, 61 bp, Homo sapiens
  misc_feature (1)..(61): Pre-microRNA sequence
ctgggaccagggggcgccatcttgactcatggtccaagatggcgacctggaacgctgagcg

SEQ ID NO: 1851 - DNA, 101 bp, Homo sapiens
  misc_feature (1)..(101): Pre-microRNA sequence
aactaggctcctaaaaacaaatagcttcagggagtcaggggagggcagaaatagatggccttcccctgctgggaagaaagtgggtcaagggggaaagggtg

SEQ ID NO: 1852 - DNA, 119 bp, Homo sapiens
  misc_feature (1)..(119): Pre-microRNA sequence
cctgttgattcccaagaaccttgatgcggcgcatatgactgggagggcacctagagcatttctgggtgaataaggcccctccatccctcaacagcagcacaagtgtgtgtgaaaaagga

SEQ ID NO: 1853 - DNA, 110 bp, Homo sapiens
  misc_feature (1)..(110): Pre-microRNA sequence
cctaggaaaggctgctggtaactgggatgggggttggggggaggtaagaagtctctgactcctcctctacctcatcccagttccatcacctgaagtggacctcttgggac

SEQ ID NO: 1854 - DNA, 102 bp, Homo sapiens
  misc_feature (1)..(102): Pre-microRNA sequence
gcctcttcctgtctctgctgtgagtgcggcagcggcagtgagtgggtgtcgacgcggcggaatgcccgtcgctgctgctgctgctgcccgacgggcctgggg

SEQ ID NO: 1855 - DNA, 119 bp, Homo sapiens
  misc_feature (1)..(119): Pre-microRNA sequence
tgctttctgcattcttctccctccccggtctcttgtgacaagccatactgttaaatatcagaatagtaggtgattacgtggagtttggggaggtggtaggaagtgccagaaactgtaaa

SEQ ID NO: 1856 - DNA, 79 bp, Homo sapiens
  misc_feature (1)..(79): Pre-microRNA sequence
ccaggagctaccaagcagaggtttattcagtctccagaaggctatgcaggttggaaaagatttcatagcggggcatctg

SEQ ID NO: 1857 - DNA, 116 bp, Homo sapiens
  misc_feature (1)..(116): Pre-microRNA sequence
gctggagccttcccctcccctcctcggcacttcccccacctcactgcccgggtgcccacaagactgtggacagtgaggtagagggagtgccgaggagggcacagctgtgcctcaga

SEQ ID NO: 1858 - DNA, 121 bp, Homo sapiens
  misc_feature (1)..(121): Pre-microRNA sequence
tccgggaatctggaggtttctagcactttcactttctctagggggtggggacggggctggggagagaatcccccagccctgttccctccatcctggctccaaatcccagttactccccgga

SEQ ID NO: 1859 - DNA, 81 bp, Homo sapiens
  misc_feature (1)..(81): Pre-microRNA sequence
ggggacctcaggctggggggctggtccgagtcctggatcctcagggactctgggaagctggagctctagcaccctcctccc

SEQ ID NO: 1860 - DNA, 101 bp, Homo sapiens
  misc_feature (1)..(101): Pre-microRNA sequence
tcttgttccttggcttgaccacaggctttccccccagccaggggcttcctcccctcactcccctccctgggctctgcctcccaatcagaaccacctcgagc

SEQ ID NO: 1861 - DNA, 70 bp, Homo sapiens
  misc_feature (1)..(70): Pre-microRNA sequence
gcggtcccctgggggctgggagcgaggggggcacagatctgatgtgccccccaccctctcacaggactgg

SEQ ID NO: 1862 - DNA, 85 bp, Homo sapiens
  misc_feature (1)..(85): Pre-microRNA sequence
ctttggtgagagtagcaccacccagggaggattcaggcattaatcatccctggcagagtgctccctggaagtttactctgaagac

SEQ ID NO: 1863 - DNA, 115 bp, Homo sapiens
  misc_feature (1)..(115): Pre-microRNA sequence
gggggtgggaagcgaggttgggtagagctaaggtatcagcaggacatagtaacaaattaaaatattatctctggcaaatgataatatagatctaaactttcagtcccaaactcaa

SEQ ID NO: 1864 - DNA, 84 bp, Homo sapiens
  misc_feature (1)..(84): Pre-microRNA sequence
ggccagaagacgatggcggtaggggagatcacgcgagagcatggcctccacctctcctccccaccgccatctccacgttctcgc

SEQ ID NO: 1865 - DNA, 87 bp, Homo sapiens
  misc_feature (1)..(87): Pre-microRNA sequence
tcccgcagccggtgactggagcccacctctgcagagacaaaggttagaaaaagagggggtgaggctctgggaaagcagaatgcgggg

SEQ ID NO: 1866 - DNA, 75 bp, Homo sapiens; identical to SEQ ID NO: 398
  misc_feature (1)..(75): Pre-microRNA sequence

SEQ ID NO: 1867 - DNA, 87 bp, Homo sapiens
  misc_feature (1)..(87): Pre-microRNA sequence
aagccctagagatcaaaagcattagtatgggcagttgagcgggaggtgaatatttaacgcttttgttcatcaataactcgttggctt

SEQ ID NO: 1868 - DNA, 105 bp, Homo sapiens
  misc_feature (1)..(105): Pre-microRNA sequence
agcatggaacaagccagaatccctctcttaccccgagagctggtccctccaggtcagggttgggacacagtggcacggggtggctgtgggtggcttgcactgccg

SEQ ID NO: 1869 - DNA, 110 bp, Homo sapiens
  misc_feature (1)..(110): Pre-microRNA sequence
aatgccagtgagtttgaaaggcactttgtccaattagaagtgtggagaaatattcatcctgtccatgacaaagatgaagtgcttctttcaaaagcggcggtggcaggctg

SEQ ID NO: 1870 - DNA, 79 bp, Homo sapiens; identical to SEQ ID NO: 403
  misc_feature (1)..(79): Pre-microRNA sequence

SEQ ID NO: 1871 - DNA, 84 bp, Homo sapiens
  misc_feature (1)..(84): Pre-microRNA sequence
tctctttctctttttgtaaatataccgtcatatataagctaaaatttctcttagggtggtggggtttgctggcagggaaaggga

SEQ ID NO: 1872 - DNA, 88 bp, Homo sapiens; identical to SEQ ID NO: 404
  misc_feature (1)..(88): Pre-microRNA sequence

SEQ ID NO: 1873 - DNA, 78 bp, Homo sapiens; identical to SEQ ID NO: 407
  misc_feature (1)..(78): Pre-microRNA sequence

SEQ ID NO: 1874 - DNA, 71 bp, Homo sapiens
  misc_feature (1)..(71): Pre-microRNA sequence
gggagtggggggatctgtttggcaactggagtgaagggattgccctccccctgctgggatccccccagccc

SEQ ID NO: 1875 - DNA, 71 bp, Homo sapiens; identical to SEQ ID NO: 565
  misc_feature (1)..(71): Pre-microRNA sequence

SEQ ID NO: 1876 - DNA, 76 bp, Homo sapiens; identical to SEQ ID NO: 409
  misc_feature (1)..(76): Pre-microRNA sequence

SEQ ID NO: 1877 - DNA, 76 bp, Homo sapiens
  misc_feature (1)..(76): Pre-microRNA sequence
ggcgaaggcggcagcggcggcgacagctctggggtttgcgtctcggggtgtgtcggccgccgctgctgcttgggcc

SEQ ID NO: 1878 - DNA, 78 bp, Homo sapiens; identical to SEQ ID NO: 410
  misc_feature (1)..(78): Pre-microRNA sequence

SEQ ID NO: 1879 - DNA, 83 bp, Homo sapiens
  misc_feature (1)..(83): Pre-microRNA sequence
atggtccccctgctgatagctcaaccatgcaagtgccataggaaacagactttggcatttgagctgctcacagtctgggtcat

SEQ ID NO: 1880 - DNA, 74 bp, Homo sapiens; identical to SEQ ID NO: 411
  misc_feature (1)..(74): Pre-microRNA sequence

SEQ ID NO: 1881 - DNA, 74 bp, Homo sapiens; identical to SEQ ID NO: 411
  misc_feature (1)..(74): Pre-microRNA sequence

SEQ ID NO: 1882 - DNA, 92 bp, Homo sapiens
  misc_feature (1)..(92): Pre-microRNA sequence
ccagctccgccagctccagccccaggtcctgagcgatgcggcccacgaaggtgccgtgttttgcttcctcggggacggagtagtggagctgg

SEQ ID NO: 1883 - DNA, 87 bp, Homo sapiens; identical to SEQ ID NO: 569
  misc_feature (1)..(87): Pre-microRNA sequence

SEQ ID NO: 1884 - DNA, 82 bp, Homo sapiens; identical to SEQ ID NO: 413
  misc_feature (1)..(82): Pre-microRNA sequence

SEQ ID NO: 1885 - DNA, 77 bp, Homo sapiens
  misc_feature (1)..(77): Pre-microRNA sequence
acgggaaaagaggagaggcaccagatatatgttctctaggccttttagaaaacatggggtttttcctttggccacgt

SEQ ID NO: 1886 - DNA, 119 bp, Homo sapiens; identical to SEQ ID NO: 545
  misc_feature (1)..(119): Pre-microRNA sequence

SEQ ID NO: 1887 - DNA, 69 bp, Homo sapiens; identical to SEQ ID NO: 546
  misc_feature (1)..(69): Pre-microRNA sequence

SEQ ID NO: 1888 - DNA, 80 bp, Homo sapiens; identical to SEQ ID NO: 547
  misc_feature (1)..(80): Pre-microRNA sequence

SEQ ID NO: 1889 - DNA, 73 bp, Homo sapiens; identical to SEQ ID NO: 548
  misc_feature (1)..(73): Pre-microRNA sequence

SEQ ID NO: 1890 - DNA, 113 bp, Homo sapiens; identical to SEQ ID NO: 549
  misc_feature (1)..(113): Pre-microRNA sequence

SEQ ID NO: 1891 - DNA, 114 bp, Homo sapiens; identical to SEQ ID NO: 550
  misc_feature (1)..(114): Pre-microRNA sequence

SEQ ID NO: 1892 - DNA, 90 bp, Homo sapiens; identical to SEQ ID NO: 417
  misc_feature (1)..(90): Pre-microRNA sequence

SEQ ID NO: 1893 - DNA, 69 bp, Homo sapiens
  misc_feature (1)..(69): Pre-microRNA sequence
gctgagcagtggggccagctcccgcccacccccaggagactggtgaggagagctgtccggctgagcagc

SEQ ID NO: 1894 - DNA, 75 bp, Homo sapiens; identical to SEQ ID NO: 573
  misc_feature (1)..(75): Pre-microRNA sequence

SEQ ID NO: 1895 - DNA, 81 bp, Homo sapiens
  misc_feature (1)..(81): Pre-microRNA sequence
ccggtgcgcggccgcggcgagggcgggggaagaaaaacaccctgtttcctctccggcccccaccgcggatcatgtaccagg

SEQ ID NO: 1896 - DNA, 78 bp, Homo sapiens; identical to SEQ ID NO: 418
  misc_feature (1)..(78): Pre-microRNA sequence

SEQ ID NO: 1897 - DNA, 84 bp, Homo sapiens; identical to SEQ ID NO: 577
  misc_feature (1)..(84): Pre-microRNA sequence

SEQ ID NO: 1898 - DNA, 88 bp, Homo sapiens
  misc_feature (1)..(88): Pre-microRNA sequence
ggcagagccaggcaggagccagagtcagcctggggggtgatggagctgaggccatcaccggtctgacagtggaccagtatggcatgct

SEQ ID NO: 1899 - DNA, 92 bp, Homo sapiens
  misc_feature (1)..(92): Pre-microRNA sequence
ccagctccgccagctccagccccaggtcctgcgcgatccggcccacgaaggtgccgtgtttggcctcctcggggacggagtagtggagctgg

SEQ ID NO: 1900 - DNA, 85 bp, Homo sapiens; identical to SEQ ID NO: 422
  misc_feature (1)..(85): Pre-microRNA sequence

SEQ ID NO: 1901 - DNA, 70 bp, Homo sapiens; identical to SEQ ID NO: 580
  misc_feature (1)..(70): Pre-microRNA sequence

SEQ ID NO: 1902 - DNA, 70 bp, Homo sapiens; identical to SEQ ID NO: 580
  misc_feature (1)..(70): Pre-microRNA sequence

SEQ ID NO: 1903 - DNA, 87 bp, Homo sapiens
  misc_feature (1)..(87): Pre-microRNA sequence
cagcctgcctttcacatatccgagccctctgtgacacatcagatttaatgagactgcacagatctcaaataaggaaggggagcgctg

SEQ ID NO: 1904 - DNA, 77 bp, Homo sapiens; identical to SEQ ID NO: 423
  misc_feature (1)..(77): Pre-microRNA sequence

SEQ ID NO: 1905 - DNA, 81 bp, Homo sapiens
  misc_feature (1)..(81): Pre-microRNA sequence
ggcttggttatgggggcagtgggggctgtaactggcttcgtatgtggccatttcctgcctttggtgcagttaaaccaagcc

SEQ ID NO: 1906 - DNA, 75 bp, Homo sapiens; identical to SEQ ID NO: 583
  misc_feature (1)..(75): Pre-microRNA sequence

SEQ ID NO: 1907 - DNA, 89 bp, Homo sapiens
  misc_feature (1)..(89): Pre-microRNA sequence
atgacatctgattgatagcttgggccaaaaaggttggcaggcctgaaggggcgggagggttaacagcccgattgtaaaatcaatgtcat

SEQ ID NO: 1908 - DNA, 81 bp, Homo sapiens; identical to SEQ ID NO: 427
  misc_feature (1)..(81): Pre-microRNA sequence

SEQ ID NO: 1909 - DNA, 77 bp, Homo sapiens
  misc_feature (1)..(77): Pre-microRNA sequence
cttgttagacaatcacagctgggggccaggggtaaatttagcctttgttcagcccccagttatgtgtgggatgcagg

SEQ ID NO: 1910 - DNA, 67 bp, Homo sapiens
  misc_feature (1)..(67): Pre-microRNA sequence
gacgaaccttggccgcagtccttgcgaactgttcgcaaaacagtgcgggctgcggtgggtcagcgtc

SEQ ID NO: 1911 - DNA, 68 bp, Homo sapiens
  misc_feature (1)..(68): Pre-microRNA sequence
gggcgctccagtctcgacgttcccggggtagagagcaacgtccggggacgaacgggacgggtgcgccc

SEQ ID NO: 1912 - DNA, 74 bp, Homo sapiens
  misc_feature (1)..(74): Pre-microRNA sequence
ggtgtgcagcagaagtacgcgtacaaggagcggcgggccaagctgtacgtgtgtgaggagtgcggctgcacatc

SEQ ID NO: 1913 - DNA, 70 bp, Homo sapiens; identical to SEQ ID NO: 585
  misc_feature (1)..(70): Pre-microRNA sequence

SEQ ID NO: 1914 - DNA, 74 bp, Homo sapiens
  misc_feature (1)..(74): Pre-microRNA sequence
cagtttgtactggggggtcaaaggggagttcttttccgaagaattctgggagagacgccaactagagcaagctg

SEQ ID NO: 1915 - DNA, 73 bp, Homo sapiens
  misc_feature (1)..(73): Pre-microRNA sequence
tggggttggatccccatggggcagcttttggaccaccagtgttaacccaggaattggagcgatctaaacccta

SEQ ID NO: 1916 - DNA, 79 bp, Homo sapiens; identical to SEQ ID NO: 432
  misc_feature (1)..(79): Pre-microRNA sequence

SEQ ID NO: 1917 - DNA, 83 bp, Homo sapiens
  misc_feature (1)..(83): Pre-microRNA sequence
gcctccccttccaggtcattacctgcggccgcggaggcaacagctgccaccatggcctgatgagtgatctggtgggcgacggc

SEQ ID NO: 1918 - DNA, 80 bp, Homo sapiens; identical to SEQ ID NO: 433
  misc_feature (1)..(80): Pre-microRNA sequence

SEQ ID NO: 1919 - DNA, 84 bp, Homo sapiens
  misc_feature (1)..(84): Pre-microRNA sequence
ggagagaggcgcagacaagagaaaataagcctgcccagcaatcatgtctggggctgctgggagggctctctctgttctctttcc

SEQ ID NO: 1920 - DNA, 74 bp, Homo sapiens; identical to SEQ ID NO: 434
  misc_feature (1)..(74): Pre-microRNA sequence

SEQ ID NO: 1921 - DNA, 69 bp, Homo sapiens; identical to SEQ ID NO: 435
  misc_feature (1)..(69): Pre-microRNA sequence

SEQ ID NO: 1922 - DNA, 86 bp, Homo sapiens; identical to SEQ ID NO: 436
  misc_feature (1)..(86): Pre-microRNA sequence

SEQ ID NO: 1923 - DNA, 71 bp, Homo sapiens
  misc_feature (1)..(71): Pre-microRNA sequence
acaggctcatccctctgaacagatgagattagtcgatcatgtaaagtcaaaagggggattatgatgcttgt

SEQ ID NO: 1924 - DNA, 79 bp, Homo sapiens
  misc_feature (1)..(79): Pre-microRNA sequence
gttggcggcacggtaggttcattagtcaataaagcattgccacgcgttttattgaattgtaaccctattttgccctgat

SEQ ID NO: 1925 - DNA, 85 bp, Homo sapiens; identical to SEQ ID NO: 441
  misc_feature (1)..(85): Pre-microRNA sequence

SEQ ID NO: 1926 - DNA, 75 bp, Homo sapiens
  misc_feature (1)..(75): Pre-microRNA sequence
ctatgcgtcttgacggatttggggttggcagagcaggctgcccctgctttctatccccattcagtccacttatag

SEQ ID NO: 1927 - DNA, 78 bp, Homo sapiens
  misc_feature (1)..(78): Pre-microRNA sequence
cctgcttgatttgcttaatggaagctgacagtgaagttcaaccctgattgtcagatttcagtaggaacctcaaggggg

SEQ ID NO: 1928 - DNA, 80 bp, Homo sapiens; identical to SEQ ID NO: 443
  misc_feature (1)..(80): Pre-microRNA sequence

SEQ ID NO: 1929 - DNA, 80 bp, Homo sapiens; identical to SEQ ID NO: 443
  misc_feature (1)..(80): Pre-microRNA sequence

SEQ ID NO: 1930 - DNA, 80 bp, Homo sapiens; identical to SEQ ID NO: 444
  misc_feature (1)..(80): Pre-microRNA sequence

SEQ ID NO: 1931 - DNA, 78 bp, Homo sapiens
  misc_feature (1)..(78): Pre-microRNA sequence
ggtctctggggggttggaccagtcatctggctctgccttcctcagggcagagctggctgctggtgaggccaggaggcc

SEQ ID NO: 1932 - DNA, 72 bp, Homo sapiens
  misc_feature (1)..(72): Pre-microRNA sequence
gatggagaaggtggcaggcagtaatggagacagaatttctgttaactgctgtaattaatgttatgtctcatc

SEQ ID NO: 1933 - DNA, 82 bp, Homo sapiens; identical to SEQ ID NO: 446
  misc_feature (1)..(82): Pre-microRNA sequence

SEQ ID NO: 1934 - DNA, 83 bp, Homo sapiens; identical to SEQ ID NO: 448
  misc_feature (1)..(83): Pre-microRNA sequence

SEQ ID NO: 1935 - DNA, 87 bp, Homo sapiens
  misc_feature (1)..(87): Pre-microRNA sequence
gccgccagcacccgcggtgccgcggggccgctccgaggagcctgagagacccacggaggcttcgcgggaagacgcggcggcggcggc

SEQ ID NO: 1936 - DNA, 84 bp, Homo sapiens
  misc_feature (1)..(84): Pre-microRNA sequence
ccctcacgaactgtgcggtaatgagaaatccaaacaccaggtgctccaggggctttgggtttgtcacatatgccactgtggggg

SEQ ID NO: 1937 - DNA, 74 bp, Homo sapiens; identical to SEQ ID NO: 451
  misc_feature (1)..(74): Pre-microRNA sequence

SEQ ID NO: 1938 - DNA, 76 bp, Homo sapiens
  misc_feature (1)..(76): Pre-microRNA sequence
ggctccgtcgacgttcggagcctgctggcccgtcgggcagctgtcgggccgcgggagtcggtccgtgggcagggcc

SEQ ID NO: 1939 - DNA, 86 bp, Homo sapiens; identical to SEQ ID NO: 452
  misc_feature (1)..(86): Pre-microRNA sequence

SEQ ID NO: 1940 - DNA, 80 bp, Homo sapiens; identical to SEQ ID NO: 453
  misc_feature (1)..(80): Pre-microRNA sequence

SEQ ID NO: 1941 - DNA, 110 bp, Homo sapiens; identical to SEQ ID NO: 455
  misc_feature (1)..(110): Pre-microRNA sequence

SEQ ID NO: 1942 - DNA, 71 bp, Homo sapiens; identical to SEQ ID NO: 456
  misc_feature (1)..(71): Pre-microRNA sequence

SEQ ID NO: 1943 - DNA, 84 bp, Homo sapiens; identical to SEQ ID NO: 457
  misc_feature (1)..(84): Pre-microRNA sequence

SEQ ID NO: 1944 - DNA, 83 bp, Homo sapiens
  misc_feature (1)..(83): Pre-microRNA sequence
cagctggggcagaggctgtttatttggtttctcattaaccaaaggaagtgcctggatcagatggagcctctgctgcttgactg

SEQ ID NO: 1945 - DNA, 79 bp, Homo sapiens; identical to SEQ ID NO: 459
  misc_feature (1)..(79): Pre-microRNA sequence

SEQ ID NO: 1946 - DNA, 84 bp, Homo sapiens
  misc_feature (1)..(84): Pre-microRNA sequence
ccagcggccacctttcctccctgccccattgggacagtcgagactggatctgtggggtttcccgggagggtggctcagggctgg

SEQ ID NO: 1947 - DNA, 90 bp, Homo sapiens; identical to SEQ ID NO: 611
  misc_feature (1)..(90): Pre-microRNA sequence

SEQ ID NO: 1948 - DNA, 82 bp, Homo sapiens; identical to SEQ ID NO: 465
  misc_feature (1)..(82): Pre-microRNA sequence

SEQ ID NO: 1949 - DNA, 74 bp, Homo sapiens; identical to SEQ ID NO: 466
  misc_feature (1)..(74): Pre-microRNA sequence

SEQ ID NO: 1950 - DNA, 82 bp, Homo sapiens
  misc_feature (1)..(82): Pre-microRNA sequence
tgtggggcttgccagtcttgttcccccagtagcctctgtgcacggggacaatggagagcttgggcaggatgatagccccacg

SEQ ID NO: 1951 - DNA, 84 bp, Homo sapiens; identical to SEQ ID NO: 469
  misc_feature (1)..(84): Pre-microRNA sequence

SEQ ID NO: 1952 - DNA, 70 bp, Homo sapiens
  misc_feature (1)..(70): Pre-microRNA sequence
caggagcgtgatgcctacttgggtcagcggctgcacagcaggtgcggctgctgctggggcagggctcttg

SEQ ID NO: 1953 - DNA, 86 bp, Homo sapiens; identical to SEQ ID NO: 471
  misc_feature (1)..(86): Pre-microRNA sequence

SEQ ID NO: 1954 - DNA, 92 bp, Homo sapiens; identical to SEQ ID NO: 472
  misc_feature (1)..(92): Pre-microRNA sequence

SEQ ID NO: 1955 - DNA, 76 bp, Homo sapiens
  misc_feature (1)..(76): Pre-microRNA sequence
ctcagggagccccaaagggtttatgggtctcccaatgaatgggagcctgttgagctcggagggggccgggcccgag

SEQ ID NO: 1956 - DNA, 77 bp, Homo sapiens
  misc_feature (1)..(77): Pre-microRNA sequence
cgtcttgctggctccccaaggcttccaggcatttgcccatctggtgaggcctccggagcaggggggctaattaggcg

SEQ ID NO: 1957 - DNA, 84 bp, Homo sapiens; identical to SEQ ID NO: 473
  misc_feature (1)..(84): Pre-microRNA sequence

SEQ ID NO: 1958 - DNA, 85 bp, Homo sapiens
  misc_feature (1)..(85): Pre-microRNA sequence
actccactctttgttgcaacttgctgactcgggtgtcccttgccaaaaaggggtaggtggtaggttacataacaaggattggggt

SEQ ID NO: 1959 - DNA, 88 bp, Homo sapiens
  misc_feature (1)..(88): Pre-microRNA sequence
ggagatgtgcgccccctctgccacgcccccaccttcctggcaggtggtgggccaccagggtggtgggaagtggccggggtttctctcc

SEQ ID NO: 1960 - DNA, 105 bp, Homo sapiens
  misc_feature (1)..(105): Pre-microRNA sequence
cttggtggttccttgagggctttgatgatcagggcagaggcagaaggcaccacctcaatctgggcctgtctgttctgaatggtcagtttcactgtaatcctcagg

SEQ ID NO: 1961 - DNA, 90 bp, Homo sapiens; identical to SEQ ID NO: 477
  misc_feature (1)..(90): Pre-microRNA sequence

SEQ ID NO: 1962 - DNA, 90 bp, Homo sapiens; identical to SEQ ID NO: 553
  misc_feature (1)..(90): Pre-microRNA sequence

SEQ ID NO: 1963 - DNA, 85 bp, Homo sapiens; identical to SEQ ID NO: 478
  misc_feature (1)..(85): Pre-microRNA sequence

SEQ ID NO: 1964 - DNA, 79 bp, Homo sapiens; identical to SEQ ID NO: 479
  misc_feature (1)..(79): Pre-microRNA sequence

SEQ ID NO: 1965 - DNA, 73 bp, Homo sapiens; identical to SEQ ID NO: 480
  misc_feature (1)..(73): Pre-microRNA sequence

SEQ ID NO: 1966 - DNA, 87 bp, Homo sapiens; identical to SEQ ID NO: 481
  misc_feature (1)..(87): Pre-microRNA sequence

SEQ ID NO: 1967 - DNA, 74 bp, Homo sapiens; identical to SEQ ID NO: 484
  misc_feature (1)..(74): Pre-microRNA sequence

SEQ ID NO: 1968 - DNA, 76 bp, Homo sapiens; identical to SEQ ID NO: 485
  misc_feature (1)..(76): Pre-microRNA sequence

SEQ ID NO: 1969 - DNA, 81 bp, Homo sapiens; identical to SEQ ID NO: 486
  misc_feature (1)..(81): Pre-microRNA sequence

SEQ ID NO: 1970 - DNA, 74 bp, Homo sapiens; identical to SEQ ID NO: 488
  misc_feature (1)..(74): Pre-microRNA sequence

SEQ ID NO: 1971 - DNA, 82 bp, Homo sapiens; identical to SEQ ID NO: 489
  misc_feature (1)..(82): Pre-microRNA sequence

SEQ ID NO: 1972 - DNA, 69 bp, Homo sapiens
  misc_feature (1)..(69): Pre-microRNA sequence
ggagaccgtcgccttctggtgggtggtggggatggacttctcctccgtctaccatgaggggaagtctct

SEQ ID NO: 1973 - DNA, 70 bp, Homo sapiens
  misc_feature (1)..(70): Pre-microRNA sequence
aaggcaggtcgaactggagctggctggggagctcattagcacctcgccagagccgagggctgcctgcctt

SEQ ID NO: 1974 - DNA, 79 bp, Homo sapiens
  misc_feature (1)..(79): Pre-microRNA sequence
agcctgttccgtgctcgctaactataaactatctgatttatattcattaaccagtactagacagcggcaggcacaggct

SEQ ID NO: 1975 - DNA, 81 bp, Homo sapiens; identical to SEQ ID NO: 625
  misc_feature (1)..(81): Pre-microRNA sequence

SEQ ID NO: 1976 - DNA, 88 bp, Homo sapiens
  misc_feature (1)..(88): Pre-microRNA sequence
gccctggcagggctggtggaagggatgggatggaggaggactcacttcccagcctctgccttccccttcctccctccctcccctgggc

SEQ ID NO: 1977 - DNA, 90 bp, Homo sapiens
  misc_feature (1)..(90): Pre-microRNA sequence
ctctccgtgcttctcggcccgccgcccttcctgtctcggggacacggtttctaaataaggttgggagggtgagagggcgggaggggagag

SEQ ID NO: 1978 - DNA, 94 bp, Homo sapiens
  misc_feature (1)..(94): Pre-microRNA sequence
ccaaattgagagctcaaggactacaactcccagtgtgcaccacaattgctttgtatgtaccttgggagttgtagtcccccttgagaagctctgg

SEQ ID NO: 1979 - DNA, 82 bp, Homo sapiens
  misc_feature (1)..(82): Pre-microRNA sequence
ggtgcgcgcggtggacgccgattcgggctacaatgcgtggctttcgtatgaattgcagctggcggcggtcggcgcgcgcatc

SEQ ID NO: 1980 - DNA, 79 bp, Homo sapiens
  misc_feature (1)..(79): Pre-microRNA sequence
agcctgcacccagggagcggcaggggagtgacacagtgagtcacagaccacaacaaagcccttcctggcatgtcgggct

SEQ ID NO: 1981 - DNA, 75 bp, Homo sapiens; identical to SEQ ID NO: 493
  misc_feature (1)..(75): Pre-microRNA sequence

SEQ ID NO: 1982 - DNA, 82 bp, Homo sapiens
  misc_feature (1)..(82): Pre-microRNA sequence
gggcaggcgtcctgcgggctccaggcttctctgccacagctggcggaggtgcttaaggccttggaccccgtgacctttgccc

SEQ ID NO: 1983 - DNA, 77 bp, Homo sapiens; identical to SEQ ID NO: 494
  misc_feature (1)..(77): Pre-microRNA sequence

SEQ ID NO: 1984 - DNA, 73 bp, Homo sapiens
  misc_feature (1)..(73): Pre-microRNA sequence
gggagggggtggccctgagcttataagggtctctaagagccaggagacagtcagcctggctacctctaatctc

SEQ ID NO: 1985 - DNA, 77 bp, Homo sapiens
  misc_feature (1)..(77): Pre-microRNA sequence
tgacttttcatccccttcacaccctctgcatttcccttttggagagctcagagggaggtgaagtgggaagaaaatca

SEQ ID NO: 1986 - DNA, 78 bp, Homo sapiens; identical to SEQ ID NO: 496
  misc_feature (1)..(78): Pre-microRNA sequence

SEQ ID NO: 1987 - DNA, 71 bp, Homo sapiens; identical to SEQ ID NO: 498
  misc_feature (1)..(71): Pre-microRNA sequence

SEQ ID NO: 1988 - DNA, 75 bp, Homo sapiens
  misc_feature (1)..(75): Pre-microRNA sequence
gatgccgggcgcccgccgcagccgctgccgccggagcccgggatggggcgagaggctgcggcggacgccagcatc

SEQ ID NO: 1989 - DNA, 66 bp, Homo sapiens
  misc_feature (1)..(66): Pre-microRNA sequence
gagctgacccagggtgggcgtttggaaggactcagcctccgtcctgcctggtgctgggatcagctt

SEQ ID NO: 1990 - DNA, 75 bp, Homo sapiens; identical to SEQ ID NO: 627
  misc_feature (1)..(75): Pre-microRNA sequence

SEQ ID NO: 1991 - DNA, 80 bp, Homo sapiens; identical to SEQ ID NO: 500
  misc_feature (1)..(80): Pre-microRNA sequence

SEQ ID NO: 1992 - DNA, 73 bp, Homo sapiens; identical to SEQ ID NO: 502
  misc_feature (1)..(73): Pre-microRNA sequence

SEQ ID NO: 1993 - DNA, 73 bp, Homo sapiens; identical to SEQ ID NO: 502
  misc_feature (1)..(73): Pre-microRNA sequence

SEQ ID NO: 1994 - DNA, 89 bp, Homo sapiens; identical to SEQ ID NO: 507
  misc_feature (1)..(89): Pre-microRNA sequence

SEQ ID NO: 1995 - DNA, 68 bp, Homo sapiens; identical to SEQ ID NO: 508
  misc_feature (1)..(68): Pre-microRNA sequence

SEQ ID NO: 1996 - DNA, 86 bp, Homo sapiens; identical to SEQ ID NO: 510
  misc_feature (1)..(86): Pre-microRNA sequence

SEQ ID NO: 1997 - DNA, 71 bp, Homo sapiens; identical to SEQ ID NO: 511
  misc_feature (1)..(71): Pre-microRNA sequence

SEQ ID NO: 1998 - DNA, 85 bp, Homo sapiens
  misc_feature (1)..(85): Pre-microRNA sequence
gctgctttgggggttttccgcccttccgcgcggctgcagctccccacggcagccccgcaaccaggcggataaccctttcctcggc

SEQ ID NO: 1999 - DNA, 90 bp, Homo sapiens; identical to SEQ ID NO: 512
  misc_feature (1)..(90): Pre-microRNA sequence

SEQ ID NO: 2000 - DNA, 74 bp, Homo sapiens; identical to SEQ ID NO: 513
  misc_feature (1)..(74): Pre-microRNA sequence

SEQ ID NO: 2001 - DNA, 74 bp, Homo sapiens; identical to SEQ ID NO: 514
  misc_feature (1)..(74): Pre-microRNA sequence

SEQ ID NO: 2002 - DNA, 84 bp, Homo sapiens
  misc_feature (1)..(84): Pre-microRNA sequence
tcccctgatttccctctgtggaagaatgtgtgaattcacatgcatcctgtcctaactgtgcaggggaaaattccagtcagggga

SEQ ID NO: 2003 - DNA, 90 bp, Homo sapiens
  misc_feature (1)..(90): Pre-microRNA sequence
aaaccagttagtcaattcgttcaggtccctaagtggcgatttgtggtaatgtctacatcaatacggacggagcggtttgctagctggttt

SEQ ID NO: 2004 - DNA, 75 bp, Homo sapiens; identical to SEQ ID NO: 517
  misc_feature (1)..(75): Pre-microRNA sequence

SEQ ID NO: 2005 - DNA, 80 bp, Homo sapiens; identical to SEQ ID NO: 520
  misc_feature (1)..(80): Pre-microRNA sequence

SEQ ID NO: 2006 - DNA, 87 bp, Homo sapiens
  misc_feature (1)..(87): Pre-microRNA sequence
gttctccttggaactcagagcacatagtgactcctttttccttttgtggtcaggaaatgagttttgctctgtttttcacttgggggc

SEQ ID NO: 2007 - DNA, 84 bp, Homo sapiens; identical to SEQ ID NO: 523
  misc_feature (1)..(84): Pre-microRNA sequence

SEQ ID NO: 2008 - DNA, 66 bp, Homo sapiens
  misc_feature (1)..(66): Pre-microRNA sequence
cacctgtcattctgcagccccctccctagcaagctccagttatagggctggggttggcaacaggtg

SEQ ID NO: 2009 - DNA, 87 bp, Homo sapiens; identical to SEQ ID NO: 525
  misc_feature (1)..(87): Pre-microRNA sequence

SEQ ID NO: 2010 - DNA, 86 bp, Homo sapiens; identical to SEQ ID NO: 641
  misc_feature (1)..(86): Pre-microRNA sequence

SEQ ID NO: 2011 - DNA, 84 bp, Homo sapiens
  misc_feature (1)..(84): Pre-microRNA sequence
gggctggggctggcaatggagcccctctcctagcctcctccatggggactggggctccaggggccccatcctgctcagcctccc

SEQ ID NO: 2012 - DNA, 107 bp, Homo sapiens; identical to SEQ ID NO: 556
  misc_feature (1)..(107): Pre-microRNA sequence

SEQ ID NO: 2013 - DNA, 83 bp, Homo sapiens; identical to SEQ ID NO: 660
  misc_feature (1)..(83): Pre-microRNA sequence

SEQ ID NO: 2014 - DNA, 84 bp, Homo sapiens; identical to SEQ ID NO: 661
  misc_feature (1)..(84): Pre-microRNA sequence

SEQ ID NO: 2015 - DNA, 79 bp, Homo sapiens; identical to SEQ ID NO: 663
  misc_feature (1)..(79): Pre-microRNA sequence

SEQ ID NO: 2016 - DNA, 80 bp, Homo sapiens; identical to SEQ ID NO: 668
  misc_feature (1)..(80): Pre-microRNA sequence

SEQ ID NO: 2017 - DNA, 79 bp, Homo sapiens
  misc_feature (1)..(79): Pre-microRNA sequence
actgtcctttttcggttatcatggtaccgatgctgtatatctgaaaggtacagtactgtgataactgaagaatggtggt

SEQ ID NO: 2018 - DNA, 75 bp, Homo sapiens
  misc_feature (1)..(75): Pre-microRNA sequence
tgccctggctcagttatcacagtgctgatgctgtctattctaaaggtacagtactgtgataactgaaggatggca

SEQ ID NO: 2019 - DNA, 97 bp, Homo sapiens
  misc_feature (1)..(97): Pre-microRNA sequence
gggacttgtcactgcctgtctcctccctctccagcagcgactggattctggagtccatctagagggtcttgggagggatgtgactgttgggaagccc

SEQ ID NO: 2020 - DNA, 87 bp, Homo sapiens
  misc_feature (1)..(87): Pre-microRNA sequence
gcagggctggcagggaggctgggaggggctggctgggtctggtagtgggcatcagctggccctcatttcttaagacagcacttctgt

SEQ ID NO: 2021 - DNA, 85 bp, Homo sapiens; identical to SEQ ID NO: 669
  misc_feature (1)..(85): Pre-microRNA sequence

SEQ ID NO: 2022 - DNA, 90 bp, Homo sapiens; identical to SEQ ID NO: 670
  misc_feature (1)..(90): Pre-microRNA sequence

SEQ ID NO: 2023 - DNA, 73 bp, Homo sapiens; identical to SEQ ID NO: 671
  misc_feature (1)..(73): Pre-microRNA sequence

SEQ ID NO: 2024 - DNA, 84 bp, Homo sapiens
  misc_feature (1)..(84): Pre-microRNA sequence
gtgagtgtggggtggctggggggggggggggggggccggggacggcttgggcctgcctagtcggcctgaccacccaccccacag

SEQ ID NO: 2025 - DNA, 86 bp, Homo sapiens; identical to SEQ ID NO: 672
  misc_feature (1)..(86): Pre-microRNA sequence

SEQ ID NO: 2026 - DNA, 85 bp, Homo sapiens; identical to SEQ ID NO: 675
  misc_feature (1)..(85): Pre-microRNA sequence

SEQ ID NO: 2027 - DNA, 52 bp, Homo sapiens
  misc_feature (1)..(52): Pre-microRNA sequence
tagccgggcgtggtggtgggggcctgtggtcccagctactttggaggctgag

SEQ ID NO: 2028 - DNA, 82 bp, Homo sapiens; identical to SEQ ID NO: 760
  misc_feature (1)..(82): Pre-microRNA sequence

SEQ ID NO: 2029 - DNA, 100 bp, Homo sapiens
  misc_feature (1)..(100): Pre-microRNA sequence
tgtgtctctctctgtgtcctgccagtggttttaccctatggtaggttacgtcatgctgttctaccacagggtagaaccacggacaggataccggggcacc

SEQ ID NO: 2030 - DNA, 88 bp, Homo sapiens; identical to SEQ ID NO: 678
  misc_feature (1)..(88): Pre-microRNA sequence

SEQ ID NO: 2031 - DNA, 89 bp, Homo sapiens; identical to SEQ ID NO: 680
  misc_feature (1)..(89): Pre-microRNA sequence

SEQ ID NO: 2032 - DNA, 84 bp, Homo sapiens; identical to SEQ ID NO: 681
  misc_feature (1)..(84): Pre-microRNA sequence

SEQ ID NO: 2033 - DNA, 89 bp, Homo sapiens; identical to SEQ ID NO: 769
  misc_feature (1)..(89): Pre-microRNA sequence

SEQ ID NO: 2034 - DNA, 110 bp, Homo sapiens; identical to SEQ ID NO: 770
  misc_feature (1)..(110): Pre-microRNA sequence

SEQ ID NO: 2035 - DNA, 137 bp, Homo sapiens
  misc_feature (1)..(137): Pre-microRNA sequence
gtcccctcccctaggccacagccgaggtcacaatcaacattcattgttgtcggtgggttgtgaggactgaggccagacccaccgggggatgaatgtcactgtggctgggccagacacggcttaaggggaatggggac

SEQ ID NO: 2036 - DNA, 82 bp, Homo sapiens
  misc_feature (1)..(82): Pre-microRNA sequence
agggggcgagggattggagagaaaggcagttcctgatggtcccctccccaggggctggctttcctctggtccttccctccca

SEQ ID NO: 2037 - DNA, 110 bp, Homo sapiens
  misc_feature (1)..(110): Pre-microRNA sequence
ggcctggctggacagagttgtcatgtgtctgcctgtctacacttgctgtgcagaacatccgctcacctgtacagcaggcacagacaggcagtcacatgacaacccagcct

SEQ ID NO: 2038 - DNA, 73 bp, Homo sapiens; identical to SEQ ID NO: 696
  misc_feature (1)..(73): Pre-microRNA sequence

SEQ ID NO: 2039 - DNA, 71 bp, Homo sapiens; identical to SEQ ID NO: 711
  misc_feature (1)..(71): Pre-microRNA sequence

SEQ ID NO: 2040 - DNA, 70 bp, Homo sapiens; identical to SEQ ID NO: 715
  misc_feature (1)..(70): Pre-microRNA sequence

SEQ ID NO: 2041 - DNA, 82 bp, Homo sapiens; identical to SEQ ID NO: 717
  misc_feature (1)..(82): Pre-microRNA sequence

SEQ ID NO: 2042 - DNA, 138 bp, Homo sapiens
  misc_feature (1)..(138): Pre-microRNA sequence
tgttattttttgtcttctacctaagaattctgtctcttaggctttctcttcccagatttcccaaagttgggaaaagctgggttgagagggcaaaaggaaaaaaaaagaattctgtctctgacataattagatagggaa

SEQ ID NO: 2043 - DNA, 79 bp, Homo sapiens
  misc_feature (1)..(79): Pre-microRNA sequence
aattaatccctctctttctagttcttcctagagtgaggaaaagctgggttgagagggcaaacaaattaactaattaatt

SEQ ID NO: 2044 - DNA, 94 bp, Homo sapiens; identical to SEQ ID NO: 783
  misc_feature (1)..(94): Pre-microRNA sequence

SEQ ID NO: 2045 - DNA, 110 bp, Homo sapiens
  misc_feature (1)..(110): Pre-microRNA sequence
ggccagctgtgagtgtttctttggcagtgtcttagctggttgttgtgagcaatagtaaggaagcaatcagcaagtatactgccctagaagtgctgcacgttgtggggccc

SEQ ID NO: 2046 - DNA, 84 bp, Homo sapiens
  misc_feature (1)..(84): Pre-microRNA sequence
gtgctcggtttgtaggcagtgtcattagctgattgtactgtggtggttacaatcactaactccactgccatcaaaacaaggcac

SEQ ID NO: 2047 - DNA, 77 bp, Homo sapiens
  misc_feature (1)..(77): Pre-microRNA sequence
agtctagttactaggcagtgtagttagctgattgctaatagtaccaatcactaaccacacggccaggtaaaaagatt

SEQ ID NO: 2048 - DNA, 67 bp, Homo sapiens; identical to SEQ ID NO: 719
  misc_feature (1)..(67): Pre-microRNA sequence

SEQ ID NO: 2049 - DNA, 69 bp, Homo sapiens; identical to SEQ ID NO: 720
  misc_feature (1)..(69): Pre-microRNA sequence

SEQ ID NO: 2050 - DNA, 72 bp, Homo sapiens
  misc_feature (1)..(72): Pre-microRNA sequence
cttgggaatggcaaggaaaccgttaccattactgagtttagtaatggtaatggttctcttgctatacccaga

SEQ ID NO: 2051 - DNA, 68 bp, Homo sapiens; identical to SEQ ID NO: 725
  misc_feature (1)..(68): Pre-microRNA sequence

SEQ ID NO: 2052 - DNA, 84 bp, Homo sapiens; identical to SEQ ID NO: 726
  misc_feature (1)..(84): Pre-microRNA sequence

SEQ ID NO: 2053 - DNA, 124 bp, Homo sapiens
  misc_feature (1)..(124): Pre-microRNA sequence
aaccctccttgggaagtgaagctcaggctgtgatttcaagccagggggcgtttttctataactggatgaaaagcacctccagagcttgaagctcacagtttgagagcaatcgtctaaggaagtt

SEQ ID NO: 2054 - DNA, 98 bp, Homo sapiens; identical to SEQ ID NO: 733
  misc_feature (1)..(98): Pre-microRNA sequence

SEQ ID NO: 2055 - DNA, 100 bp, Homo sapiens; identical to SEQ ID NO: 739
  misc_feature (1)..(100): Pre-microRNA sequence

SEQ ID NO: 2056 - DNA, 93 bp, Homo sapiens; identical to SEQ ID NO: 741
  misc_feature (1)..(93): Pre-microRNA sequence

SEQ ID NO: 2057 - DNA, 118 bp, Homo sapiens; identical to SEQ ID NO: 742
  misc_feature (1)..(118): Pre-microRNA sequence

SEQ ID NO: 2058 - DNA, 98 bp, Homo sapiens; identical to SEQ ID NO: 745
  misc_feature (1)..(98): Pre-microRNA sequence

SEQ ID NO: 2059 - DNA, 74 bp, Homo sapiens
  misc_feature (1)..(74): Pre-microRNA sequence
ccgcactctctccattacactaccctgcctcttctccatgagaggcagcggggtgtagtggatagagcacgggt

SEQ ID NO: 2060 - DNA, 75 bp, Homo sapiens; identical to SEQ ID NO: 749
  misc_feature (1)..(75): Pre-microRNA sequence

SEQ ID NO: 2061 - DNA, 96 bp, Homo sapiens; identical to SEQ ID NO: 750
  misc_feature (1)..(96): Pre-microRNA sequence

SEQ ID NO: 2062 - DNA, 119 bp, Homo sapiens; identical to SEQ ID NO: 752
  misc_feature (1)..(119): Pre-microRNA sequence

SEQ ID NO: 2063 - DNA, 81 bp, Homo sapiens; identical to SEQ ID NO: 793
  misc_feature (1)..(81): Pre-microRNA sequence

SEQ ID NO: 2064 - DNA, 31 bp, Artificial Sequence; identical to SEQ ID NO: 1090
  Synthetic probe

SEQ ID NO: 2065 - DNA, 28 bp, Artificial Sequence
  Synthetic probe
tgccctgcccaccccctcccctgccccg

SEQ ID NO: 2066 - DNA, 34 bp, Artificial Sequence
  Synthetic probe
ttgctacccgtttcccctcctcttgaagttgctt

SEQ ID NO: 2067 - DNA, 31 bp, Artificial Sequence; identical to SEQ ID NO: 1066
  Synthetic probe

SEQ ID NO: 2068 - DNA, 35 bp, Artificial Sequence; identical to SEQ ID NO: 1426
  Synthetic probe

SEQ ID NO: 2069 - DNA, 34 bp, Artificial Sequence
  Synthetic probe
acctcccctccttctctccctcccacaagaccaa

SEQ ID NO: 2070 - DNA, 32 bp, Artificial Sequence; identical to SEQ ID NO: 1118
  Synthetic probe

SEQ ID NO: 2071 - DNA, 33 bp, Artificial Sequence; identical to SEQ ID NO: 1439
  Synthetic probe

SEQ ID NO: 2072 - DNA, 34 bp, Artificial Sequence; identical to SEQ ID NO: 1067
  Synthetic probe

SEQ ID NO: 2073 - DNA, 34 bp, Artificial Sequence
  Synthetic probe
cttcccctcccgacctcagagccctgttcttcct

SEQ ID NO: 2074 - DNA, 32 bp, Artificial Sequence
  Synthetic probe
aggactcccctcccctcccactgtgccctgtc

SEQ ID NO: 2075 - DNA, 35 bp, Artificial Sequence; identical to SEQ ID NO: 1474
  Synthetic probe

SEQ ID NO: 2076 - DNA, 32 bp, Artificial Sequence
  Synthetic probe
ttctgctttcccagagcctcaccccctctttt

SEQ ID NO: 2077 - DNA, 30 bp, Artificial Sequence; identical to SEQ ID NO: 1513
  Synthetic probe

SEQ ID NO: 2078 - DNA, 33 bp, Artificial Sequence
  Synthetic probe
gccgccatccccggagccgccgccgccgccgcc

SEQ ID NO: 2079 - DNA, 35 bp, Artificial Sequence
  Synthetic probe
ctttcctttcctcccctccacaccccatgactccc

SEQ ID NO: 2080 - DNA, 40 bp, Artificial Sequence; identical to SEQ ID NO: 1143
  Synthetic probe

SEQ ID NO: 2081 - DNA, 32 bp, Artificial Sequence
  Synthetic probe
cgggtctcccgcttccccctcctgctccaagg

SEQ ID NO: 2082 - DNA, 30 bp, Artificial Sequence; identical to SEQ ID NO: 1561
  Synthetic probe

SEQ ID NO: 2083 - DNA, 30 bp, Artificial Sequence; identical to SEQ ID NO: 1075
  Synthetic probe

SEQ ID NO: 2084 - DNA, 35 bp, Artificial Sequence; identical to SEQ ID NO: 1164
  Synthetic probe

SEQ ID NO: 2085 - DNA, 34 bp, Artificial Sequence; identical to SEQ ID NO: 1588
  Synthetic probe

SEQ ID NO: 2086 - DNA, 31 bp, Artificial Sequence; identical to SEQ ID NO: 64
  Synthetic probe

SEQ ID NO: 2087 - DNA, 31 bp, Artificial Sequence; identical to SEQ ID NO: 1616
  Synthetic probe

SEQ ID NO: 2088 - DNA, 44 bp, Artificial Sequence; identical to SEQ ID NO: 1624
  Synthetic probe

SEQ ID NO: 2089 - DNA, 32 bp, Artificial Sequence; identical to SEQ ID NO: 97
  Synthetic probe

SEQ ID NO: 2090 - DNA, 39 bp, Artificial Sequence; identical to SEQ ID NO: 3
  Synthetic probe

SEQ ID NO: 2091 - DNA, 31 bp, Artificial Sequence; identical to SEQ ID NO: 1081
  Synthetic probe

SEQ ID NO: 2092 - DNA, 22 bp, Artificial Sequence
  Synthetic probe
aaccatacaacctactacctca

SEQ ID NO: 2093 - DNA, 22 bp, Artificial Sequence
  Synthetic probe
aactatgcaacctactacctct

SEQ ID NO: 2094 - DNA, 23 bp, Artificial Sequence
  Synthetic probe
tcatagccctgtacaatgctgct

SEQ ID NO: 2095 - DNA, 23 bp, Artificial Sequence
  Synthetic probe
ctacctgcactgtaagcactttt

SEQ ID NO: 2096 - DNA, 23 bp, Artificial Sequence
  Synthetic probe
tgatagccctgtacaatgctgct

SEQ ID NO: 2097 - DNA, 22 bp, Artificial Sequence
  Synthetic probe
cgccaatatttacgtgctgcta

SEQ ID NO: 2098 - DNA, 23 bp, Artificial Sequence
  Synthetic probe
ctacctgcactgtaagcactttg

SEQ ID NO: 2099 - DNA, 22 bp, Artificial Sequence
  Synthetic probe
tcatcattaccaggcagtatta

SEQ ID NO: 2100 - DNA, 23 bp, Artificial Sequence
  Synthetic probe
tccatcattacccggcagtatta

SEQ ID NO: 2101 - DNA, 23 bp, Artificial Sequence
  Synthetic probe
ctacctgcactataagcacttta

SEQ ID NO: 2102 - DNA, 23 bp, Artificial Sequence
  Synthetic probe
ctacctgcactatgagcactttg

SEQ ID NO: 2103 - DNA, 24 bp, Artificial Sequence
  Synthetic probe
tgggagaacctccctgcttctgct

SEQ ID NO: 2104 - DNA, 22 bp, Artificial Sequence
  Synthetic probe
tcgccctctcaacccagctttt

SEQ ID NO: 2105 - DNA, 22 bp, Artificial Sequence
  Synthetic probe
ttgccctctcaacccagctttt

SEQ ID NO: 2106 - DNA, 19 bp, Artificial Sequence
  Synthetic probe
tcctctcaacccagctttt

SEQ ID NO: 2107 - DNA, 37 bp, Artificial Sequence; identical to SEQ ID NO: 1091
  Synthetic probe

SEQ ID NO: 2108 - DNA, 30 bp, Artificial Sequence; identical to SEQ ID NO: 1092
  Synthetic probe

SEQ ID NO: 2109 - DNA, 46 bp, Artificial Sequence; identical to SEQ ID NO: 149
  Synthetic probe

SEQ ID NO: 2110 - DNA, 32 bp, Artificial Sequence
  Synthetic probe
gacatcagacagagttgtttcttctccctcta

SEQ ID NO: 2111 - DNA, 33 bp, Artificial Sequence
  Synthetic probe
cccccaccaaacctattcccgcatcctccccgg

SEQ ID NO: 2112 - DNA, 32 bp, Artificial Sequence
  Synthetic probe
tccactctgaccagctcaccctcactggacta

SEQ ID NO: 2113 - DNA, 33 bp, Artificial Sequence; identical to SEQ ID NO: 1103
  Synthetic probe

SEQ ID NO: 2114 - DNA, 31 bp, Artificial Sequence; identical to SEQ ID NO: 1105
  Synthetic probe

SEQ ID NO: 2115 - DNA, 32 bp, Artificial Sequence
  Synthetic probe
caactgacacctccttccttttcctccttcgt

SEQ ID NO: 2116 - DNA, 33 bp, Artificial Sequence; identical to SEQ ID NO: 1108
  Synthetic probe

SEQ ID NO: 2117 - DNA, 34 bp, Artificial Sequence; identical to SEQ ID NO: 1406
  Synthetic probe

SEQ ID NO: 2118 - DNA, 30 bp, Artificial Sequence; identical to SEQ ID NO: 1112
  Synthetic probe

SEQ ID NO: 2119 - DNA, 25 bp, Artificial Sequence
  Synthetic probe
ttcctagataccactcccagctcca

SEQ ID NO: 2120 - DNA, 34 bp, Artificial Sequence; identical to SEQ ID NO: 1115
  Synthetic probe

SEQ ID NO: 2121 - DNA, 33 bp, Artificial Sequence; identical to SEQ ID NO: 1424
  Synthetic probe

SEQ ID NO: 2122 - DNA, 35 bp, Artificial Sequence
  Synthetic probe
gctccatgtctcctcccctccgcgaaagcctaaac

SEQ ID NO: 2123 - DNA, 33 bp, Artificial Sequence
  Synthetic probe
ccccctccatgaccatttgtattagtatctttt

SEQ ID NO: 2124 - DNA, 35 bp, Artificial Sequence; identical to SEQ ID NO: 1450
  Synthetic probe

SEQ ID NO: 2125 - DNA, 36 bp, Artificial Sequence; identical to SEQ ID NO: 1124
  Synthetic probe

SEQ ID NO: 2126 - DNA, 33 bp, Artificial Sequence
  Synthetic probe
tcagactgtgctctctccattccccaggactcc

SEQ ID NO: 2127 - DNA, 33 bp, Artificial Sequence
  Synthetic probe
actgcagaggagccaccccaccctcctcccaag

SEQ ID NO: 2128 - DNA, 36 bp, Artificial Sequence
  Synthetic probe
ctcccggcccctcacccttccctgggccctccaccc

SEQ ID NO: 2129 - DNA, 34 bp, Artificial Sequence; identical to SEQ ID NO: 1128
  Synthetic probe

SEQ ID NO: 2130 - DNA, 35 bp, Artificial Sequence; identical to SEQ ID NO: 1483
  Synthetic probe

SEQ ID NO: 2131 - DNA, 34 bp, Artificial Sequence; identical to SEQ ID NO: 1129
  Synthetic probe

SEQ ID NO: 2132 - DNA, 34 bp, Artificial Sequence
  Synthetic probe
cgtcagactgtgctctctccattccccaggactc

SEQ ID NO: 2133 - DNA, 31 bp, Artificial Sequence
  Synthetic probe
cccgtgtccccccaacctggggccaggccca

SEQ ID NO: 2134 - DNA, 33 bp, Artificial Sequence; identical to SEQ ID NO: 1069
  Synthetic probe

SEQ ID NO: 2135 - DNA, 33 bp, Artificial Sequence; identical to SEQ ID NO: 1136
  Synthetic probe

SEQ ID NO: 2136 - DNA, 35 bp, Artificial Sequence
  Synthetic probe
ctcagagcactgtgtgtgacgtcctcctgtctgtc

SEQ ID NO: 2137 - DNA, 33 bp, Artificial Sequence
  Synthetic probe
gacaggctgctctccttctgctcttagcttcct

SEQ ID NO: 2138 - DNA, 35 bp, Artificial Sequence
  Synthetic probe
ccttcctccttcccctgggtccccctaagttctcc

SEQ ID NO: 2139 - DNA, 33 bp, Artificial Sequence
  Synthetic probe
tgcctccaccctctccatcccgtcaccctccca

SEQ ID NO: 2140 - DNA, 29 bp, Artificial Sequence
  Synthetic probe
gactgattcaacctctctctcccacttta

SEQ ID NO: 2141 - DNA, 30 bp, Artificial Sequence; identical to SEQ ID NO: 1070
  Synthetic probe

SEQ ID NO: 2142 - DNA, 34 bp, Artificial Sequence; identical to SEQ ID NO: 1154
  Synthetic probe

SEQ ID NO: 2143 - DNA, 32 bp, Artificial Sequence; identical to SEQ ID NO: 35
  Synthetic probe

SEQ ID NO: 2144 - DNA, 39 bp, Artificial Sequence
  Synthetic probe
tccactctgaccagctcaccctcactggactatgacccc

SEQ ID NO: 2145 - DNA, 40 bp, Artificial Sequence
  Synthetic probe
cactccctccctggctcctggagaccctctccaggacttg

SEQ ID NO: 2146 - DNA, 27 bp, Artificial Sequence
  Synthetic probe
ggccctccccctgcctgtgataggctg

SEQ ID NO: 2147 - DNA, 34 bp, Artificial Sequence; identical to SEQ ID NO: 1157
  Synthetic probe

SEQ ID NO: 2148 - DNA, 32 bp, Artificial Sequence
  Synthetic probe
tgctgtttcctctggcctcaagcctgtggggg

SEQ ID NO: 2149 - DNA, 30 bp, Artificial Sequence
  Synthetic probe
acttttcttaatgactttcccctccttaag

SEQ ID NO: 2150 - DNA, 31 bp, Artificial Sequence
  Synthetic probe
tactcccgccgtttacccgtgcttcattgaa

SEQ ID NO: 2151 - DNA, 34 bp, Artificial Sequence; identical to SEQ ID NO: 1588
  Synthetic probe

SEQ ID NO: 2152 - DNA, 30 bp, Artificial Sequence; identical to SEQ ID NO: 1589
  Synthetic probe

SEQ ID NO: 2153 - DNA, 32 bp, Artificial Sequence; identical to SEQ ID NO: 1590
  Synthetic probe

SEQ ID NO: 2154 - DNA, 29 bp, Artificial Sequence
  Synthetic probe
ccccagctggagaatttttcccctcatta

SEQ ID NO: 2155 - DNA, 33 bp, Artificial Sequence; identical to SEQ ID NO: 1168
  Synthetic probe

SEQ ID NO: 2156 - DNA, 29 bp, Artificial Sequence
  Synthetic probe
gctccctctctggttggacctcacccaaa

SEQ ID NO: 2157 - DNA, 30 bp, Artificial Sequence; identical to SEQ ID NO: 1173
  Synthetic probe

SEQ ID NO: 2158 - DNA, 35 bp, Artificial Sequence; identical to SEQ ID NO: 1603
  Synthetic probe

SEQ ID NO: 2159 - DNA, 35 bp, Artificial Sequence
  Synthetic probe
ttccccctctaagtctgcctgggctcttggcactg

SEQ ID NO: 2160 - DNA, 30 bp, Artificial Sequence; identical to SEQ ID NO: 85
  Synthetic probe

SEQ ID NO: 2161 - DNA, 30 bp, Artificial Sequence; identical to SEQ ID NO: 1615
  Synthetic probe

SEQ ID NO: 2162 - DNA, 32 bp, Artificial Sequence; identical to SEQ ID NO: 1079
  Synthetic probe

SEQ ID NO: 2163 - DNA, 58 bp, Artificial Sequence; identical to SEQ ID NO: 164
  Synthetic probe

SEQ ID NO: 2164 - DNA, 30 bp, Artificial Sequence; identical to SEQ ID NO: 106
  Synthetic probe

SEQ ID NO: 2165 - DNA, 30 bp, Artificial Sequence; identical to SEQ ID NO: 1181
  Synthetic probe

SEQ ID NO: 2166 - DNA, 29 bp, Artificial Sequence
  Synthetic probe
gacccctttctcccagcctgtttctgcaa

SEQ ID NO: 2167 - DNA, 28 bp, Artificial Sequence
  Synthetic probe
tggagtaccacctgtttttcccccactt

SEQ ID NO: 2168 - DNA, 32 bp, Artificial Sequence; identical to SEQ ID NO: 1080
  Synthetic probe

SEQ ID NO: 2169 - DNA, 22 bp, Artificial Sequence
  Synthetic probe
aaccacacaacctactacctca

SEQ ID NO: 2170 - DNA, 22 bp, Artificial Sequence
  Synthetic probe
aactatacaacctcctacctca

SEQ ID NO: 2171 - DNA, 18 bp, Artificial Sequence
  Synthetic probe
cccccaccaccacgcccg

SEQ ID NO: 2172 - DNA, 17 bp, Artificial Sequence
  Synthetic probe
tggcgcccgaacaggga

SEQ ID NO: 2173 - DNA, 22 bp, Artificial Sequence
  Synthetic probe
tgtaaaccatgatgtgctgcta

SEQ ID NO: 2174 - DNA, 23 bp, Artificial Sequence
  Synthetic probe
actcaccgacagcgttgaatgtt

SEQ ID NO: 2175 - DNA, 22 bp, Artificial Sequence
  Synthetic probe
gaacctatctcccctctggacc

SEQ ID NO: 2176 - DNA, 21 bp, Artificial Sequence
  Synthetic probe
acccagtagccagatgtagct

SEQ ID NO: 2177 - DNA, 22 bp, Artificial Sequence
  Synthetic probe
agcctatcctggattacttgaa

SEQ ID NO: 2178 - DNA, 22 bp, Artificial Sequence
  Synthetic probe
cttccagtcggggatgtttaca

SEQ ID NO: 2179 - DNA, 17 bp, Artificial Sequence
  Synthetic probe
tggaggccccagcgaga

SEQ ID NO: 2180 - DNA, 22 bp, Artificial Sequence
  Synthetic probe
acaggccgggacaagtgcaata

SEQ ID NO: 2181 - DNA, 22 bp, Artificial Sequence
  Synthetic probe
cactgcaccgcgtcccgtccct

SEQ ID NO: 2182 - DNA, 22 bp, Artificial Sequence
  Synthetic probe
ctgcgattcctccctctactgt

SEQ ID NO: 2183 - DNA, 22 bp, Artificial Sequence
  Synthetic probe
aacaatacaacttactacctca

SEQ ID NO: 2184 - DNA, 76 bp, Homo sapiens; identical to SEQ ID NO: 1211
  misc_feature (1)..(76): Pre-microRNA sequence

SEQ ID NO: 2185 - DNA, 72 bp, Homo sapiens; identical to SEQ ID NO: 536
  misc_feature (1)..(72): Pre-microRNA sequence

SEQ ID NO: 2186 - DNA, 72 bp, Homo sapiens
  misc_feature (1)..(72): Pre-microRNA sequence
ttgctgaagttctaccttctcacaaggttgctaaagtgaagcaacttcaagaggaggggaaacgggtagcaa

SEQ ID NO: 2187 - DNA, 81 bp, Homo sapiens; identical to SEQ ID NO: 1242
  misc_feature (1)..(81): Pre-microRNA sequence

SEQ ID NO: 2188 - DNA, 91 bp, Homo sapiens; identical to SEQ ID NO: 1772
  misc_feature (1)..(91): Pre-microRNA sequence

SEQ ID NO: 2189 - DNA, 127 bp, Homo sapiens; identical to SEQ ID NO: 1781
  misc_feature (1)..(127): Pre-microRNA sequence

SEQ ID NO: 2190 - DNA, 100 bp, Homo sapiens; identical to SEQ ID NO: 1243
  misc_feature (1)..(100): Pre-microRNA sequence

SEQ ID NO: 2191 - DNA, 100 bp, Homo sapiens; identical to SEQ ID NO: 1787
  misc_feature (1)..(100): Pre-microRNA sequence

SEQ ID NO: 2192 - DNA, 121 bp, Homo sapiens; identical to SEQ ID NO: 1245
  misc_feature (1)..(121): Pre-microRNA sequence

SEQ ID NO: 2193 - DNA, 109 bp, Homo sapiens
  misc_feature (1)..(109): Pre-microRNA sequence
atctcacagaggaagaacagggctctgaggtcgggaggggaaggcggctcaggacttctggctccagagcctcctctccttccaccatagtgcctgctccagaggagac

SEQ ID NO: 2194 - DNA, 86 bp, Homo sapiens; identical to SEQ ID NO: 1824
  misc_feature (1)..(86): Pre-microRNA sequence

SEQ ID NO: 2195 - DNA, 105 bp, Homo sapiens; identical to SEQ ID NO: 1825
  misc_feature (1)..(105): Pre-microRNA sequence

SEQ ID NO: 2196 - DNA, 87 bp, Homo sapiens; identical to SEQ ID NO: 1865
  misc_feature (1)..(87): Pre-microRNA sequence

SEQ ID NO: 2197 - DNA, 75 bp, Homo sapiens; identical to SEQ ID NO: 398
  misc_feature (1)..(75): Pre-microRNA sequence

SEQ ID NO: 2198 - DNA, 87 bp, Homo sapiens; identical to SEQ ID NO: 401
  misc_feature (1)..(87): Pre-microRNA sequence

SEQ ID NO: 2199 - DNA, 94 bp, Homo sapiens; identical to SEQ ID NO: 402
  misc_feature (1)..(94): Pre-microRNA sequence

SEQ ID NO: 2200 - DNA, 83 bp, Homo sapiens; identical to SEQ ID NO: 1271
  misc_feature (1)..(83): Pre-microRNA sequence

SEQ ID NO: 2201 - DNA, 75 bp, Homo sapiens; identical to SEQ ID NO: 426
  misc_feature (1)..(75): Pre-microRNA sequence

SEQ ID NO: 2202 - DNA, 74 bp, Homo sapiens; identical to SEQ ID NO: 1914
  misc_feature (1)..(74): Pre-microRNA sequence

SEQ ID NO: 2203 - DNA, 74 bp, Homo sapiens; identical to SEQ ID NO: 450
  misc_feature (1)..(74): Pre-microRNA sequence

SEQ ID NO: 2204 - DNA, 109 bp, Homo sapiens; identical to SEQ ID NO: 1299
  misc_feature (1)..(109): Pre-microRNA sequence

SEQ ID NO: 2205 - DNA, 110 bp, Homo sapiens; identical to SEQ ID NO: 455
  misc_feature (1)..(110): Pre-microRNA sequence

SEQ ID NO: 2206 - DNA, 81 bp, Homo sapiens; identical to SEQ ID NO: 460
  misc_feature (1)..(81): Pre-microRNA sequence

SEQ ID NO: 2207 - DNA, 81 bp, Homo sapiens; identical to SEQ ID NO: 486
  misc_feature (1)..(81): Pre-microRNA sequence

SEQ ID NO: 2208 - DNA, 90 bp, Homo sapiens; identical to SEQ ID NO: 1977
  misc_feature (1)..(90): Pre-microRNA sequence

SEQ ID NO: 2209 - DNA, 79 bp, Homo sapiens; identical to SEQ ID NO: 492
  misc_feature (1)..(79): Pre-microRNA sequence

SEQ ID NO: 2210 - DNA, 98 bp, Homo sapiens; identical to SEQ ID NO: 400
  misc_feature (1)..(98): Pre-microRNA sequence

SEQ ID NO: 2211 - DNA, 84 bp, Homo sapiens; identical to SEQ ID NO: 521
  misc_feature (1)..(84): Pre-microRNA sequence

SEQ ID NO: 2212 - DNA, 84 bp, Homo sapiens; identical to SEQ ID NO: 661
  misc_feature (1)..(84): Pre-microRNA sequence

SEQ ID NO: 2213 - DNA, 87 bp, Homo sapiens; identical to SEQ ID NO: 662
  misc_feature (1)..(87): Pre-microRNA sequence

SEQ ID NO: 2214 - DNA, 78 bp, Homo sapiens; identical to SEQ ID NO: 755
  misc_feature (1)..(78): Pre-microRNA sequence

SEQ ID NO: 2215 - DNA, 78 bp, Homo sapiens; identical to SEQ ID NO: 754
  misc_feature (1)..(78): Pre-microRNA sequence

SEQ ID NO: 2216 - DNA, 81 bp, Homo sapiens; identical to SEQ ID NO: 756
  misc_feature (1)..(81): Pre-microRNA sequence

SEQ ID NO: 2217 - DNA, 81 bp, Homo sapiens; identical to SEQ ID NO: 758
  misc_feature (1)..(81): Pre-microRNA sequence

SEQ ID NO: 2218 - DNA, 89 bp, Homo sapiens; identical to SEQ ID NO: 683
  misc_feature (1)..(89): Pre-microRNA sequence

SEQ ID NO: 2219 - DNA, 81 bp, Homo sapiens; identical to SEQ ID NO: 684
  misc_feature (1)..(81): Pre-microRNA sequence

SEQ ID NO: 2220 - DNA, 84 bp, Homo sapiens; identical to SEQ ID NO: 766
  misc_feature (1)..(84): Pre-microRNA sequence

SEQ ID NO: 2221 - DNA, 95 bp, Homo sapiens; identical to SEQ ID NO: 692
  misc_feature (1)..(95): Pre-microRNA sequence

SEQ ID NO: 2222 - DNA, 68 bp, Homo sapiens; identical to SEQ ID NO: 693
  misc_feature (1)..(68): Pre-microRNA sequence

SEQ ID NO: 2223 - DNA, 71 bp, Homo sapiens; identical to SEQ ID NO: 775
  misc_feature (1)..(71): Pre-microRNA sequence

SEQ ID NO: 2224 - DNA, 69 bp, Homo sapiens; identical to SEQ ID NO: 776
  misc_feature (1)..(69): Pre-microRNA sequence

SEQ ID NO: 2225 - DNA, 88 bp, Homo sapiens; identical to SEQ ID NO: 706
  misc_feature (1)..(88): Pre-microRNA sequence

SEQ ID NO: 2226 - DNA, 82 bp, Homo sapiens; identical to SEQ ID NO: 717
  misc_feature (1)..(82): Pre-microRNA sequence

SEQ ID NO: 2227 - DNA, 138 bp, Homo sapiens; identical to SEQ ID NO: 2042
  misc_feature (1)..(138): Pre-microRNA sequence

SEQ ID NO: 2228 - DNA, 79 bp, Homo sapiens; identical to SEQ ID NO: 2043
  misc_feature (1)..(79): Pre-microRNA sequence

SEQ ID NO: 2229 - DNA, 48 bp, Homo sapiens
  misc_feature (1)..(48): Pre-microRNA sequence
ttctcgtcccagttcttcccaaagttgagaaaagctgggttgagagga

SEQ ID NO: 2230 - DNA, 48 bp, Homo sapiens
  misc_feature (1)..(48): Pre-microRNA sequence
ttctcttcccagttcttcttggagtcaggaaaagctgggttgagagga

SEQ ID NO: 2231 - DNA, 85 bp, Homo sapiens; identical to SEQ ID NO: 1212
  misc_feature (1)..(85): Pre-microRNA sequence

SEQ ID NO: 2232 - DNA, 85 bp, Homo sapiens; identical to SEQ ID NO: 537
  misc_feature (1)..(85): Pre-microRNA sequence

SEQ ID NO: 2233 - DNA, 95 bp, Homo sapiens; identical to SEQ ID NO: 543
  misc_feature (1)..(95): Pre-microRNA sequence

SEQ ID NO: 2234 - DNA, 78 bp, Homo sapiens; identical to SEQ ID NO: 544
  misc_feature (1)..(78): Pre-microRNA sequence

SEQ ID NO: 2235 - DNA, 80 bp, Homo sapiens; identical to SEQ ID NO: 547
  misc_feature (1)..(80): Pre-microRNA sequence

SEQ ID NO: 2236 - DNA, 73 bp, Homo sapiens
  misc_feature (1)..(73): Pre-microRNA sequence
ttcacccatgacccttgtcctcacccccacccaaggggtcatagtccagtgagggtgagctggtcagagtgga

SEQ ID NO: 2237 - DNA, 148 bp, Homo sapiens; identical to SEQ ID NO: 558
  misc_feature (1)..(148): Pre-microRNA sequence

SEQ ID NO: 2238 - DNA, 77 bp, Homo sapiens; identical to SEQ ID NO: 1227
  misc_feature (1)..(77): Pre-microRNA sequence

SEQ ID NO: 2239 - DNA, 97 bp, Homo sapiens
  misc_feature (1)..(97): Pre-microRNA sequence
acgaaggaggaaaaggaaggaggtgtcagttggactgccccaaggcaacccttgagccatcaggacagctcaacacctcctctgttttcttctttgt

SEQ ID NO: 2240 - DNA, 113 bp, Homo sapiens; identical to SEQ ID NO: 1230
  misc_feature (1)..(113): Pre-microRNA sequence

SEQ ID NO: 2241 - DNA, 124 bp, Homo sapiens; identical to SEQ ID NO: 1231
  misc_feature (1)..(124): Pre-microRNA sequence

SEQ ID NO: 2242 - DNA, 81 bp, Homo sapiens; identical to SEQ ID NO: 1235
  misc_feature (1)..(81): Pre-microRNA sequence

SEQ ID NO: 2243 - DNA, 58 bp, Homo sapiens; identical to SEQ ID NO: 1236
  misc_feature (1)..(58): Pre-microRNA sequence

SEQ ID NO: 2244 - DNA, 121 bp, Homo sapiens; identical to SEQ ID NO: 1238
  misc_feature (1)..(121): Pre-microRNA sequence

SEQ ID NO: 2245 - DNA, 115 bp, Homo sapiens; identical to SEQ ID NO: 1769
  misc_feature (1)..(115): Pre-microRNA sequence

SEQ ID NO: 2246 - DNA, 91 bp, Homo sapiens; identical to SEQ ID NO: 1772
  misc_feature (1)..(91): Pre-microRNA sequence

SEQ ID NO: 2247 - DNA, 100 bp, Homo sapiens; identical to SEQ ID NO: 1787
  misc_feature (1)..(100): Pre-microRNA sequence

SEQ ID NO: 2248 - DNA, 97 bp, Homo sapiens; identical to SEQ ID NO: 1770
  misc_feature (1)..(97): Pre-microRNA sequence

SEQ ID NO: 2249 - DNA, 121 bp, Homo sapiens; identical to SEQ ID NO: 1251
  misc_feature (1)..(121): Pre-microRNA sequence

SEQ ID NO: 2250 - DNA, 113 bp, Homo sapiens
  misc_feature (1)..(113): Pre-microRNA sequence
tggttctctgtgttttgtggactgtgctctcactgttcacccagcactagcagtaccagacggttctgtggagtcctggggaatggagagagcacagtctgacgccctgccaa

SEQ ID NO: 2251 - DNA, 121 bp, Homo sapiens
  misc_feature (1)..(121): Pre-microRNA sequence
tggttctctgtgttttgtggactctgctctcactgttcacccagcactagcagtaccagatggttctgtggagtcctggggaatggagagagcacagtctgactccctgccaagtagccag

SEQ ID NO: 2252 - DNA, 119 bp, Homo sapiens; identical to SEQ ID NO: 1809
  misc_feature (1)..(119): Pre-microRNA sequence

SEQ ID NO: 2253 - DNA, 118 bp, Homo sapiens; identical to SEQ ID NO: 1828
  misc_feature (1)..(118): Pre-microRNA sequence

SEQ ID NO: 2254 - DNA, 117 bp, Homo sapiens; identical to SEQ ID NO: 1255
  misc_feature (1)..(117): Pre-microRNA sequence

SEQ ID NO: 2255 - DNA, 95 bp, Homo sapiens; identical to SEQ ID NO: 1834
  misc_feature (1)..(95): Pre-microRNA sequence

SEQ ID NO: 2256 - DNA, 99 bp, Homo sapiens; identical to SEQ ID NO: 1256
  misc_feature (1)..(99): Pre-microRNA sequence

SEQ ID NO: 2257 - DNA, 113 bp, Homo sapiens; identical to SEQ ID NO: 2250
  misc_feature (1)..(113): Pre-microRNA sequence

SEQ ID NO: 2258 - DNA, 81 bp, Homo sapiens; identical to SEQ ID NO: 1849
  misc_feature (1)..(81): Pre-microRNA sequence

SEQ ID NO: 2259 - DNA, 88 bp, Homo sapiens; identical to SEQ ID NO: 1262
  misc_feature (1)..(88): Pre-microRNA sequence

SEQ ID NO: 2260 - DNA, 111 bp, Homo sapiens; identical to SEQ ID NO: 1264
  misc_feature (1)..(111): Pre-microRNA sequence

SEQ ID NO: 2261 - DNA, 78 bp, Homo sapiens
  misc_feature (1)..(78): Pre-microRNA sequence
gacagacaggaggacgtcacacacagtgctctgaggacctcacttgccctgtggcggctgccctccaaacacactgtg

SEQ ID NO: 2262 - DNA, 112 bp, Homo sapiens
  misc_feature (1)..(112): Pre-microRNA sequence
gagaggtgtctgtgaggaagctaagagcagaaggagagcagcctgtcagaaaacgggctgtccctccctccctaatcacagccctactcacagcaaactccctccctctcca

SEQ ID NO: 2263 - DNA, 121 bp, Homo sapiens
  misc_feature (1)..(121): Pre-microRNA sequence
ctacagcttggcaaaaagggagaacttagggggacccaggggaaggaggaaggccaccccactcccttcctgccattcctgtcatcccagcgaggcctccgaccctgcaaaaggctgtgag

SEQ ID NO: 2264 - DNA, 114 bp, Homo sapiens
  misc_feature (1)..(114): Pre-microRNA sequence
ggaaaggaccagggatggcctgcacccctcgggaagcttggccaaggtgccctgggagggtgccctgggagggtgacgggatggagagggtggaggcaccctgctggaagccag

SEQ ID NO: 2265 - DNA, 72 bp, Homo sapiens; identical to SEQ ID NO: 406
  misc_feature (1)..(72): Pre-microRNA sequence

SEQ ID NO: 2266 - DNA, 77 bp, Homo sapiens; identical to SEQ ID NO: 408
  misc_feature (1)..(77): Pre-microRNA sequence

SEQ ID NO: 2267 - DNA, 88 bp, Homo sapiens; identical to SEQ ID NO: 1286
  misc_feature (1)..(88): Pre-microRNA sequence

SEQ ID NO: 2268 - DNA, 80 bp, Homo sapiens; identical to SEQ ID NO: 431
  misc_feature (1)..(80): Pre-microRNA sequence

SEQ ID NO: 2269 - DNA, 73 bp, Homo sapiens; identical to SEQ ID NO: 2236
  misc_feature (1)..(73): Pre-microRNA sequence

SEQ ID NO: 2270 - DNA, 85 bp, Homo sapiens
  misc_feature (1)..(85): Pre-microRNA sequence
caagtcctggagagggtctccaggagccagggagggagtgactaacttctgactgcctgggggcctgagagaaggctgggacttg

SEQ ID NO: 2271 - DNA, 69 bp, Homo sapiens; identical to SEQ ID NO: 435
  misc_feature (1)..(69): Pre-microRNA sequence

SEQ ID NO: 2272 - DNA, 72 bp, Homo sapiens; identical to SEQ ID NO: 1289
  misc_feature (1)..(72): Pre-microRNA sequence

SEQ ID NO: 2273 - DNA, 77 bp, Homo sapiens; identical to SEQ ID NO: 597
  misc_feature (1)..(77): Pre-microRNA sequence

SEQ ID NO: 2274 - DNA, 83 bp, Homo sapiens; identical to SEQ ID NO: 447
  misc_feature (1)..(83): Pre-microRNA sequence

SEQ ID NO: 2275 - DNA, 80 bp, Homo sapiens; identical to SEQ ID NO: 1279
  misc_feature (1)..(80): Pre-microRNA sequence

SEQ ID NO: 2276 - DNA, 110 bp, Homo sapiens; identical to SEQ ID NO: 455
  misc_feature (1)..(110): Pre-microRNA sequence

SEQ ID NO: 2277 - DNA, 71 bp, Homo sapiens; identical to SEQ ID NO: 456
  misc_feature (1)..(71): Pre-microRNA sequence

SEQ ID NO: 2278 - DNA, 84 bp, Homo sapiens; identical to SEQ ID NO: 457
  misc_feature (1)..(84): Pre-microRNA sequence

SEQ ID NO: 2279 - DNA, 73 bp, Homo sapiens; identical to SEQ ID NO: 608
  misc_feature (1)..(73): Pre-microRNA sequence

SEQ ID NO: 2280 - DNA, 87 bp, Homo sapiens; identical to SEQ ID NO: 462
  misc_feature (1)..(87): Pre-microRNA sequence

SEQ ID NO: 2281 - DNA, 74 bp, Homo sapiens; identical to SEQ ID NO: 464
  misc_feature (1)..(74): Pre-microRNA sequence

SEQ ID NO: 2282 - DNA, 73 bp, Homo sapiens; identical to SEQ ID NO: 468
  misc_feature (1)..(73): Pre-microRNA sequence

SEQ ID NO: 2283 - DNA, 77 bp, Homo sapiens; identical to SEQ ID NO: 1956
  misc_feature (1)..(77): Pre-microRNA sequence

SEQ ID NO: 2284 - DNA, 90 bp, Homo sapiens; identical to SEQ ID NO: 475
  misc_feature (1)..(90): Pre-microRNA sequence

SEQ ID NO: 2285 - DNA, 73 bp, Homo sapiens; identical to SEQ ID NO: 480
  misc_feature (1)..(73): Pre-microRNA sequence

SEQ ID NO: 2286 - DNA, 76 bp, Homo sapiens; identical to SEQ ID NO: 485
  misc_feature (1)..(76): Pre-microRNA sequence

SEQ ID NO: 2287 - DNA, 98 bp, Homo sapiens; identical to SEQ ID NO: 400
  misc_feature (1)..(98): Pre-microRNA sequence

SEQ ID NO: 2288 - DNA, 148 bp, Homo sapiens; identical to SEQ ID NO: 558
  misc_feature (1)..(148): Pre-microRNA sequence

SEQ ID NO: 2289 - DNA, 75 bp, Homo sapiens; identical to SEQ ID NO: 501
  misc_feature (1)..(75): Pre-microRNA sequence

SEQ ID NO: 2290 - DNA, 85 bp, Homo sapiens; identical to SEQ ID NO: 504
  misc_feature (1)..(85): Pre-microRNA sequence

SEQ ID NO: 2291 - DNA, 73 bp, Homo sapiens; identical to SEQ ID NO: 506
  misc_feature (1)..(73): Pre-microRNA sequence

SEQ ID NO: 2292 - DNA, 66 bp, Homo sapiens; identical to SEQ ID NO: 1323
  misc_feature (1)..(66): Pre-microRNA sequence

SEQ ID NO: 2293 - DNA, 85 bp, Homo sapiens; identical to SEQ ID NO: 516
  misc_feature (1)..(85): Pre-microRNA sequence

SEQ ID NO: 2294 - DNA, 83 bp, Homo sapiens; identical to SEQ ID NO: 660
  misc_feature (1)..(83): Pre-microRNA sequence

SEQ ID NO: 2295 - DNA, 79 bp, Homo sapiens; identical to SEQ ID NO: 663
  misc_feature (1)..(79): Pre-microRNA sequence

SEQ ID NO: 2296 - DNA, 52 bp, Homo sapiens; identical to SEQ ID NO: 2027
  misc_feature (1)..(52): Pre-microRNA sequence

SEQ ID NO: 2297 - DNA, 67 bp, Homo sapiens
  misc_feature (1)..(67): Pre-microRNA sequence
cttcttcactcacgtccctgttcgggcgccacttgtggctgtcggttcgggactgaatgaagaagga

SEQ ID NO: 2298 - DNA, 98 bp, Homo sapiens; identical to SEQ ID NO: 765
  misc_feature (1)..(98): Pre-microRNA sequence

SEQ ID NO: 2299 - DNA, 110 bp, Homo sapiens; identical to SEQ ID NO: 768
  misc_feature (1)..(110): Pre-microRNA sequence

SEQ ID NO: 2300 - DNA, 110 bp, Homo sapiens; identical to SEQ ID NO: 767
  misc_feature (1)..(110): Pre-microRNA sequence

SEQ ID NO: 2301 - DNA, 62 bp, Homo sapiens; identical to SEQ ID NO: 686
  misc_feature (1)..(62): Pre-microRNA sequence

SEQ ID NO: 2302 - DNA, 110 bp, Homo sapiens; identical to SEQ ID NO: 779
  misc_feature (1)..(110): Pre-microRNA sequence

SEQ ID NO: 2303 - DNA, 77 bp, Homo sapiens; identical to SEQ ID NO: 701
  misc_feature (1)..(77): Pre-microRNA sequence

SEQ ID NO: 2304 - DNA, 84 bp, Homo sapiens; identical to SEQ ID NO: 702
  misc_feature (1)..(84): Pre-microRNA sequence

SEQ ID NO: 2305 - DNA, 70 bp, Homo sapiens; identical to SEQ ID NO: 715
  misc_feature (1)..(70): Pre-microRNA sequence

SEQ ID NO: 2306 - DNA, 110 bp, Homo sapiens; identical to SEQ ID NO: 1362
  misc_feature (1)..(110): Pre-microRNA sequence

SEQ ID NO: 2307 - DNA, 78 bp, Homo sapiens; identical to SEQ ID NO: 791
  misc_feature (1)..(78): Pre-microRNA sequence

SEQ ID NO: 2308 - DNA, 75 bp, Homo sapiens; identical to SEQ ID NO: 749
  misc_feature (1)..(75): Pre-microRNA sequence

SEQ ID NO: 2309 - DNA, 96 bp, Homo sapiens; identical to SEQ ID NO: 750
  misc_feature (1)..(96): Pre-microRNA sequence

SEQ ID NO: 2310 - DNA, 98 bp, Homo sapiens
  misc_feature (1)..(98): Pre-microRNA sequence
tcaaggccactgggacagtagagggaggaatcgcagaaatcactccaggagcaactgagagaccttgcttctactttaccaggtcctgctggcccaga

SEQ ID NO: 2311 - DNA, 119 bp, Homo sapiens; identical to SEQ ID NO: 752
  misc_feature (1)..(119): Pre-microRNA sequence

SEQ ID NO: 2312 - DNA, 54 bp, Artificial Sequence; identical to SEQ ID NO: 157
  Synthetic probe

SEQ ID NO: 2313 - DNA, 38 bp, Artificial Sequence; identical to SEQ ID NO: 158
  Synthetic probe

SEQ ID NO: 2314 - DNA, 35 bp, Artificial Sequence; identical to SEQ ID NO: 135
  Synthetic probe

SEQ ID NO: 2315 - DNA, 30 bp, Artificial Sequence; identical to SEQ ID NO: 140
  Synthetic probe

SEQ ID NO: 2316 - DNA, 28 bp, Artificial Sequence
  Synthetic probe
gaagcccttccgcttccaccccgaacac

SEQ ID NO: 2317 - DNA, 32 bp, Artificial Sequence; identical to SEQ ID NO: 144
  Synthetic probe

SEQ ID NO: 2318 - DNA, 67 bp, Artificial Sequence; identical to SEQ ID NO: 148
  Synthetic probe

SEQ ID NO: 2319 - DNA, 36 bp, Artificial Sequence; identical to SEQ ID NO: 1379
  Synthetic probe

SEQ ID NO: 2320 - DNA, 39 bp, Artificial Sequence; identical to SEQ ID NO: 150
  Synthetic probe

SEQ ID NO: 2321 - DNA, 28 bp, Artificial Sequence
  Synthetic probe
ccccgcccctggcgcgcccccgacaggc

SEQ ID NO: 2322 - DNA, 35 bp, Artificial Sequence; identical to SEQ ID NO: 1386
  Synthetic probe

SEQ ID NO: 2323 - DNA, 34 bp, Artificial Sequence; identical to SEQ ID NO: 1387
  Synthetic probe

SEQ ID NO: 2324 - DNA, 31 bp, Artificial Sequence; identical to SEQ ID NO: 1388
  Synthetic probe

SEQ ID NO: 2325 - DNA, 32 bp, Artificial Sequence
  Synthetic probe
aaacctattcccgcatcctccccggctctggc

SEQ ID NO: 2326 - DNA, 27 bp, Artificial Sequence
  Synthetic probe
ccgggctcccccacccgctccctgagc

SEQ ID NO: 2327 - DNA, 28 bp, Artificial Sequence
  Synthetic probe
aacccgggctcccccacccgctccctga

SEQ ID NO: 2328 - DNA, 32 bp, Artificial Sequence; identical to SEQ ID NO: 1390
  Synthetic probe

SEQ ID NO: 2329 - DNA, 34 bp, Artificial Sequence; identical to SEQ ID NO: 1391
  Synthetic probe

SEQ ID NO: 2330 - DNA, 32 bp, Artificial Sequence; identical to SEQ ID NO: 1392
  Synthetic probe

SEQ ID NO: 2331 - DNA, 35 bp, Artificial Sequence; identical to SEQ ID NO: 1393
  Synthetic probe

SEQ ID NO: 2332 - DNA, 32 bp, Artificial Sequence
  Synthetic probe
cctcccccgcccggggctcagcctctcacctg

SEQ ID NO: 2333 - DNA, 32 bp, Artificial Sequence; identical to SEQ ID NO: 1394
  Synthetic probe

SEQ ID NO: 2334 - DNA, 33 bp, Artificial Sequence; identical to SEQ ID NO: 1395
  Synthetic probe

SEQ ID NO: 2335 - DNA, 34 bp, Artificial Sequence; identical to SEQ ID NO: 1396
  Synthetic probe

SEQ ID NO: 2336 - DNA, 35 bp, Artificial Sequence; identical to SEQ ID NO: 1411
  Synthetic probe

SEQ ID NO: 2337 - DNA, 34 bp, Artificial Sequence
  Synthetic probe
cccggctctccctcccctgcgccgcgctctcgcc

SEQ ID NO: 2338 - DNA, 34 bp, Artificial Sequence
  Synthetic probe
cccatcccagctgtccctttctttgctttcatca

SEQ ID NO: 2339 - DNA, 36 bp, Artificial Sequence
  Synthetic probe
ccagggcttctcccatcccagctgtccctttctttg

SEQ ID NO: 2340 - DNA, 33 bp, Artificial Sequence; identical to SEQ ID NO: 1412
  Synthetic probe

SEQ ID NO: 2341 - DNA, 35 bp, Artificial Sequence; identical to SEQ ID NO: 1414
  Synthetic probe

SEQ ID NO: 2342 - DNA, 33 bp, Artificial Sequence; identical to SEQ ID NO: 1420
  Synthetic probe

SEQ ID NO: 2343 - DNA, 33 bp, Artificial Sequence; identical to SEQ ID NO: 1422
  Synthetic probe

SEQ ID NO: 2344 - DNA, 32 bp, Artificial Sequence
  Synthetic probe
atcagaggccgaccccggcgtccaggccggca

SEQ ID NO: 2345 - DNA, 32 bp, Artificial Sequence
  Synthetic probe
tggaccaatcagaggccgaccccggcgtccag

SEQ ID NO: 2346 - DNA, 34 bp, Artificial Sequence
  Synthetic probe
tctccgccgggccttcaccctgccctgctcttct

SEQ ID NO: 2347 - DNA, 33 bp, Artificial Sequence; identical to SEQ ID NO: 1425
  Synthetic probe

SEQ ID NO: 2348 - DNA, 33 bp, Artificial Sequence
  Synthetic probe
gtcccctggcccccgacctgctccatccaccca

SEQ ID NO: 2349 - DNA, 33 bp, Artificial Sequence; identical to SEQ ID NO: 2348
  Synthetic probe

SEQ ID NO: 2350 - DNA, 34 bp, Artificial Sequence; identical to SEQ ID NO: 1427
  Synthetic probe

SEQ ID NO: 2351 - DNA, 32 bp, Artificial Sequence; identical to SEQ ID NO: 1428
  Synthetic probe

SEQ ID NO: 2352 - DNA, 32 bp, Artificial Sequence
  Synthetic probe
tccccagagcccgccccaacccacctcgatct

SEQ ID NO: 2353 - DNA, 33 bp, Artificial Sequence; identical to SEQ ID NO: 1431
  Synthetic probe

SEQ ID NO: 2354 - DNA, 32 bp, Artificial Sequence; identical to SEQ ID NO: 1432
  Synthetic probe

SEQ ID NO: 2355 - DNA, 35 bp, Artificial Sequence
  Synthetic probe
tccgccagggtccgcgtgtcagtcccctctggtga

SEQ ID NO: 2356 - DNA, 35 bp, Artificial Sequence; identical to SEQ ID NO: 1444
  Synthetic probe

SEQ ID NO: 2357 - DNA, 35 bp, Artificial Sequence; identical to SEQ ID NO: 1445
  Synthetic probe

SEQ ID NO: 2358 - DNA, 35 bp, Artificial Sequence
  Synthetic probe
ctcctcgtcccccttcccacctcggtgtcttgctt

SEQ ID NO: 2359 - DNA, 35 bp, Artificial Sequence
  Synthetic probe
gggcccagtcctcctcgtcccccttcccacctcgg

SEQ ID NO: 2360 - DNA, 34 bp, Artificial Sequence; identical to SEQ ID NO: 1447
  Synthetic probe

SEQ ID NO: 2361 - DNA, 34 bp, Artificial Sequence
  Synthetic probe
cctggggccacccgtccctgcccctttacccctt

SEQ ID NO: 2362 - DNA, 33 bp, Artificial Sequence
  Synthetic probe
gcagctccgccagtctctgtgggcagggagaag

SEQ ID NO: 2363 - DNA, 33 bp, Artificial Sequence; identical to SEQ ID NO: 1451
  Synthetic probe

SEQ ID NO: 2364 - DNA, 35 bp, Artificial Sequence; identical to SEQ ID NO: 1452
  Synthetic probe

SEQ ID NO: 2365 - DNA, 36 bp, Artificial Sequence
  Synthetic probe
tcctgagccgccttcccctcccgacctcagagccct

SEQ ID NO: 2366 - DNA, 33 bp, Artificial Sequence; identical to SEQ ID NO: 1456
  Synthetic probe

SEQ ID NO: 2367 - DNA, 36 bp, Artificial Sequence
  Synthetic probe
cccccattgtggctgctcccaccccacctgccttca

SEQ ID NO: 2368 - DNA, 34 bp, Artificial Sequence; identical to SEQ ID NO: 1457
  Synthetic probe

SEQ ID NO: 2369 - DNA, 35 bp, Artificial Sequence; identical to SEQ ID NO: 1458
  Synthetic probe

SEQ ID NO: 2370 - DNA, 33 bp, Artificial Sequence; identical to SEQ ID NO: 1459
  Synthetic probe

SEQ ID NO: 2371 - DNA, 33 bp, Artificial Sequence
  Synthetic probe
gctcaaagtttgcctcccatggcccctctgccc

SEQ ID NO: 2372 - DNA, 33 bp, Artificial Sequence
  Synthetic probe
tggttctgcccaagcgccccttcctccctcctt

SEQ ID NO: 2373 - DNA, 32 bp, Artificial Sequence; identical to SEQ ID NO: 1467
  Synthetic probe

SEQ ID NO: 2374 - DNA, 31 bp, Artificial Sequence
  Synthetic probe
ctgcctggcgctgggctcttccccatgagcg

SEQ ID NO: 2375 - DNA, 32 bp, Artificial Sequence
  Synthetic probe
tccaacactgcctggcgctgggctcttcccca

SEQ ID NO: 2376 - DNA, 32 bp, Artificial Sequence
  Synthetic probe
tccggcttccccccacccgcccttcgatggca

SEQ ID NO: 2377 - DNA, 32 bp, Artificial Sequence; identical to SEQ ID NO: 1470
  Synthetic probe

SEQ ID NO: 2378 - DNA, 33 bp, Artificial Sequence; identical to SEQ ID NO: 1477
  Synthetic probe

SEQ ID NO: 2379 - DNA, 32 bp, Artificial Sequence
  Synthetic probe
tgtgtgggctatcccagccgcctccttcctct

SEQ ID NO: 2380 - DNA, 32 bp, Artificial Sequence; identical to SEQ ID NO: 1478
  Synthetic probe

SEQ ID NO: 2381 - DNA, 35 bp, Artificial Sequence; identical to SEQ ID NO: 1487
  Synthetic probe

SEQ ID NO: 2382 - DNA, 30 bp, Artificial Sequence; identical to SEQ ID NO: 1490
  Synthetic probe

SEQ ID NO: 2383 - DNA, 31 bp, Artificial Sequence
  Synthetic probe
ggccctagccttcctgtcccctggcccccga

SEQ ID NO: 2384 - DNA, 36 bp, Artificial Sequence; identical to SEQ ID NO: 1491
  Synthetic probe

SEQ ID NO: 2385 - DNA, 32 bp, Artificial Sequence; identical to SEQ ID NO: 1495
  Synthetic probe

SEQ ID NO: 2386 - DNA, 35 bp, Artificial Sequence; identical to SEQ ID NO: 1501
  Synthetic probe

SEQ ID NO: 2387 - DNA, 34 bp, Artificial Sequence
  Synthetic probe
tttacagtttctggcacttcctaccacctcccca

SEQ ID NO: 2388 - DNA, 31 bp, Artificial Sequence; identical to SEQ ID NO: 1503
  Synthetic probe

SEQ ID NO: 2389 - DNA, 36 bp, Artificial Sequence; identical to SEQ ID NO: 1505
  Synthetic probe

SEQ ID NO: 2390 - DNA, 35 bp, Artificial Sequence; identical to SEQ ID NO: 1508
  Synthetic probe

SEQ ID NO: 2391 - DNA, 33 bp, Artificial Sequence; identical to SEQ ID NO: 1142
  Synthetic probe

SEQ ID NO: 2392 - DNA, 35 bp, Artificial Sequence; identical to SEQ ID NO: 1
  Synthetic probe

SEQ ID NO: 2393 - DNA, 30 bp, Artificial Sequence
  Synthetic probe
cccctcccccaagttgagacttgcagctac

SEQ ID NO: 2394 - DNA, 36 bp, Artificial Sequence; identical to SEQ ID NO: 1516
  Synthetic probe

SEQ ID NO: 2395 - DNA, 33 bp, Artificial Sequence
  Synthetic probe
acctcggtctcctccaccagactttaaactctc

SEQ ID NO: 2396 - DNA, 33 bp, Artificial Sequence
  Synthetic probe
ccagtgatacctcggtctcctccaccagacttt

SEQ ID NO: 2397 - DNA, 33 bp, Artificial Sequence
  Synthetic probe
tgtaataaccagtgatacctcggtctcctccac

SEQ ID NO: 2398 - DNA, 41 bp, Artificial Sequence; identical to SEQ ID NO: 4
  Synthetic probe

SEQ ID NO: 2399 - DNA, 34 bp, Artificial Sequence
  Synthetic probe
agcggagccgccgccatccccggagccgccgccg

SEQ ID NO: 2400 - DNA, 32 bp, Artificial Sequence; identical to SEQ ID NO: 1519
  Synthetic probe

SEQ ID NO: 2401 - DNA, 31 bp, Artificial Sequence; identical to SEQ ID NO: 1520
  Synthetic probe

SEQ ID NO: 2402 - DNA, 32 bp, Artificial Sequence; identical to SEQ ID NO: 12
  Synthetic probe

SEQ ID NO: 2403 - DNA, 35 bp, Artificial Sequence; identical to SEQ ID NO: 1524
  Synthetic probe

SEQ ID NO: 2404 - DNA, 31 bp, Artificial Sequence; identical to SEQ ID NO: 19
  Synthetic probe

SEQ ID NO: 2405 - DNA, 60 bp, Artificial Sequence; identical to SEQ ID NO: 151
  Synthetic probe

SEQ ID NO: 2406 - DNA, 36 bp, Artificial Sequence; identical to SEQ ID NO: 152
  Synthetic probe

SEQ ID NO: 2407 - DNA, 39 bp, Artificial Sequence; identical to SEQ ID NO: 153
  Synthetic probe

SEQ ID NO: 2408 - DNA, 30 bp, Artificial Sequence; identical to SEQ ID NO: 154
  Synthetic probe

SEQ ID NO: 2409 - DNA, 52 bp, Artificial Sequence; identical to SEQ ID NO: 155
  Synthetic probe

SEQ ID NO: 2410 - DNA, 55 bp, Artificial Sequence; identical to SEQ ID NO: 156
  Synthetic probe

SEQ ID NO: 2411 - DNA, 31 bp, Artificial Sequence; identical to SEQ ID NO: 272
  Synthetic probe

SEQ ID NO: 2412 - DNA, 31 bp, Artificial Sequence; identical to SEQ ID NO: 25
  Synthetic probe

SEQ ID NO: 2413 - DNA, 33 bp, Artificial Sequence; identical to SEQ ID NO: 1547
  Synthetic probe

SEQ ID NO: 2414 - DNA, 32 bp, Artificial Sequence; identical to SEQ ID NO: 29
  Synthetic probe

SEQ ID NO: 2415 - DNA, 32 bp, Artificial Sequence
  Synthetic probe
gggctgccgggtctcccgcttccccctcctgc

SEQ ID NO: 2416 - DNA, 32 bp, Artificial Sequence
  Synthetic probe
tccccagtctccctgtttcagcacctgcctca

SEQ ID NO: 2417 - DNA, 36 bp, Artificial Sequence; identical to SEQ ID NO: 32
  Synthetic probe

SEQ ID NO: 2418 - DNA, 31 bp, Artificial Sequence; identical to SEQ ID NO: 1153
  Synthetic probe

SEQ ID NO: 2419 - DNA, 31 bp, Artificial Sequence
  Synthetic probe
cgccccagtcccagcccaattaataaatggg

SEQ ID NO: 2420 - DNA, 31 bp, Artificial Sequence; identical to SEQ ID NO: 1560
  Synthetic probe

SEQ ID NO: 2421 - DNA, 32 bp, Artificial Sequence; identical to SEQ ID NO: 40
  Synthetic probe

SEQ ID NO: 2422 - DNA, 33 bp, Artificial Sequence
  Synthetic probe
tcaccatgcggccccggtggtcttcacacagca

SEQ ID NO: 2423 - DNA, 31 bp, Artificial Sequence; identical to SEQ ID NO: 1582
  Synthetic probe

SEQ ID NO: 2424 - DNA, 31 bp, Artificial Sequence
  Synthetic probe
catagttactcccgccgtttacccgtgcttc

SEQ ID NO: 2425 - DNA, 29 bp, Artificial Sequence
  Synthetic probe
tccttctgctcagctgttcccggtgccag

SEQ ID NO: 2426 - DNA, 31 bp, Artificial Sequence; identical to SEQ ID NO: 70
  Synthetic probe

SEQ ID NO: 2427 - DNA, 32 bp, Artificial Sequence; identical to SEQ ID NO: 1600
  Synthetic probe

SEQ ID NO: 2428 - DNA, 29 bp, Artificial Sequence
  Synthetic probe
gcacacccgctctccggcccgcgcccctg

SEQ ID NO: 2429 - DNA, 42 bp, Artificial Sequence; identical to SEQ ID NO: 159
  Synthetic probe

SEQ ID NO: 2430 - DNA, 29 bp, Artificial Sequence
  Synthetic probe
cccagagaaccggaattcctccccgcccc

SEQ ID NO: 2431 - DNA, 30 bp, Artificial Sequence; identical to SEQ ID NO: 1622
  Synthetic probe

SEQ ID NO: 2432 - DNA, 37 bp, Artificial Sequence; identical to SEQ ID NO: 1626
  Synthetic probe

SEQ ID NO: 2433 - DNA, 31 bp, Artificial Sequence; identical to SEQ ID NO: 98
  Synthetic probe

SEQ ID NO: 2434 - DNA, 31 bp, Artificial Sequence; identical to SEQ ID NO: 1633
  Synthetic probe

SEQ ID NO: 2435 - DNA, 33 bp, Artificial Sequence
  Synthetic probe
ccgccctgcccatctccgactatccctggcccc

SEQ ID NO: 2436 - DNA, 33 bp, Artificial Sequence; identical to SEQ ID NO: 1641
  Synthetic probe

SEQ ID NO: 2437 - DNA, 33 bp, Artificial Sequence; identical to SEQ ID NO: 114
  Synthetic probe

SEQ ID NO: 2438 - DNA, 35 bp, Artificial Sequence; identical to SEQ ID NO: 122
  Synthetic probe

SEQ ID NO: 2439 - DNA, 33 bp, Artificial Sequence; identical to SEQ ID NO: 1654
  Synthetic probe

SEQ ID NO: 2440 - DNA, 33 bp, Artificial Sequence; identical to SEQ ID NO: 130
  Synthetic probe

SEQ ID NO: 2441 - DNA, 21 bp, Artificial Sequence
  Synthetic probe
cacacacctgcccccgcccac

SEQ ID NO: 2442 - DNA, 17 bp, Artificial Sequence
  Synthetic probe
gacagcctctcccccac

SEQ ID NO: 2443 - DNA, 18 bp, Artificial Sequence
  Synthetic probe
ccactgaaccacccatgc

SEQ ID NO: 2444 - DNA, 22 bp, Artificial Sequence
  Synthetic probe
tcaacatcagtctgataagcta

SEQ ID NO: 2445 - DNA, 22 bp, Artificial Sequence
  Synthetic probe
ggaaagcgcccccattttgagt

SEQ ID NO: 2446 - DNA, 23 bp, Artificial Sequence
  Synthetic probe
aaagtctcgctctctgcccctca

SEQ ID NO: 2447 - DNA, 21 bp, Artificial Sequence
  Synthetic probe
atcctgtactgagctgccccg

SEQ ID NO: 2448 - DNA, 25 bp, Artificial Sequence
  Synthetic probe
aaggagctcagaagccctgcccagc

SEQ ID NO: 2449 - DNA, 25 bp, Artificial Sequence
  Synthetic probe
aggccgccacccgcccgcgatccct

SEQ ID NO: 2450 - DNA, 22 bp, Artificial Sequence
  Synthetic probe
gcggtcccgcggcgccccgcct

SEQ ID NO: 2451 - DNA, 22 bp, Artificial Sequence
  Synthetic probe
tgctgttagccctagccccgca

SEQ ID NO: 2452 - DNA, 21 bp, Artificial Sequence
  Synthetic probe
agtttcttttcctccgctgac

SEQ ID NO: 2453 - DNA, 123 bp, Homo sapiens; identical to SEQ ID NO: 551
  misc_feature (1)..(123): Pre-microRNA sequence

SEQ ID NO: 2454 - DNA, 78 bp, Homo sapiens; identical to SEQ ID NO: 552
  misc_feature (1)..(78): Pre-microRNA sequence

SEQ ID NO: 2455 - DNA, 87 bp, Homo sapiens; identical to SEQ ID NO: 530
  misc_feature (1)..(87): Pre-microRNA sequence

SEQ ID NO: 2456 - DNA, 87 bp, Homo sapiens; identical to SEQ ID NO: 534
  misc_feature (1)..(87): Pre-microRNA sequence

SEQ ID NO: 2457 - DNA, 79 bp, Homo sapiens; identical to SEQ ID NO: 535
  misc_feature (1)..(79): Pre-microRNA sequence

SEQ ID NO: 2458 - DNA, 72 bp, Homo sapiens; identical to SEQ ID NO: 538
  misc_feature (1)..(72): Pre-microRNA sequence

SEQ ID NO: 2459 - DNA, 142 bp, Homo sapiens; identical to SEQ ID NO: 542
  misc_feature (1)..(142): Pre-microRNA sequence

SEQ ID NO: 2460 - DNA, 78 bp, Homo sapiens; identical to SEQ ID NO: 544
  misc_feature (1)..(78): Pre-microRNA sequence

SEQ ID NO: 2461 - DNA, 65 bp, Homo sapiens; identical to SEQ ID NO: 1730
  misc_feature (1)..(65): Pre-microRNA sequence

SEQ ID NO: 2462 - DNA, 92 bp, Homo sapiens; identical to SEQ ID NO: 1731
  misc_feature (1)..(92): Pre-microRNA sequence

SEQ ID NO: 2463 - DNA, 119 bp, Homo sapiens; identical to SEQ ID NO: 545
  misc_feature (1)..(119): Pre-microRNA sequence

SEQ ID NO: 2464 - DNA, 69 bp, Homo sapiens; identical to SEQ ID NO: 546
  misc_feature (1)..(69): Pre-microRNA sequence

SEQ ID NO: 2465 - DNA, 80 bp, Homo sapiens; identical to SEQ ID NO: 547
  misc_feature (1)..(80): Pre-microRNA sequence

SEQ ID NO: 2466 - DNA, 73 bp, Homo sapiens; identical to SEQ ID NO: 548
  misc_feature (1)..(73): Pre-microRNA sequence

SEQ ID NO: 2467 - DNA, 87 bp, Homo sapiens; identical to SEQ ID NO: 1735
  misc_feature (1)..(87): Pre-microRNA sequence

SEQ ID NO: 2468 - DNA, 113 bp, Homo sapiens; identical to SEQ ID NO: 549
  misc_feature (1)..(113): Pre-microRNA sequence

SEQ ID NO: 2469 - DNA, 114 bp, Homo sapiens; identical to SEQ ID NO: 550
  misc_feature (1)..(114): Pre-microRNA sequence

SEQ ID NO: 2470 - DNA, 123 bp, Homo sapiens; identical to SEQ ID NO: 551
  misc_feature (1)..(123): Pre-microRNA sequence

SEQ ID NO: 2471 - DNA, 78 bp, Homo sapiens; identical to SEQ ID NO: 552
  misc_feature (1)..(78): Pre-microRNA sequence

SEQ ID NO: 2472 - DNA, 90 bp, Homo sapiens; identical to SEQ ID NO: 553
  misc_feature (1)..(90): Pre-microRNA sequence

SEQ ID NO: 2473 - DNA, 145 bp, Homo sapiens; identical to SEQ ID NO: 554
  misc_feature (1)..(145): Pre-microRNA sequence

SEQ ID NO: 2474 - DNA, 115 bp, Homo sapiens; identical to SEQ ID NO: 1756
  misc_feature (1)..(115): Pre-microRNA sequence

SEQ ID NO: 2475 - DNA, 126 bp, Homo sapiens
  misc_feature (1)..(126): Pre-microRNA sequence
ccctaacttccctctctacaccctcgctcttcccaccgctcccgtccttctccctagccgagaaccggttggaaggctcccgcggaaagcgaggcgagagcgcggcgcaggggagggagagccggg

SEQ ID NO: 2476 - DNA, 128 bp, Homo sapiens
  misc_feature (1)..(128): Pre-microRNA sequence
ctgcagctaagaggggtgtgatgaaagcaaagaaagggacagctgggatgggagaagccctggggggagcagggaggctcccacatgttgtaccctccggtaacactcaggccctggacagtcagcag

SEQ ID NO: 2477 - DNA, 106 bp, Homo sapiens; identical to SEQ ID NO: 1757
  misc_feature (1)..(106): Pre-microRNA sequence

SEQ ID NO: 2478 - DNA, 136 bp, Homo sapiens; identical to SEQ ID NO: 1759
  misc_feature (1)..(136): Pre-microRNA sequence

SEQ ID NO: 2479 - DNA, 78 bp, Homo sapiens; identical to SEQ ID NO: 1765
  misc_feature (1)..(78): Pre-microRNA sequence

SEQ ID NO: 2480 - DNA, 78 bp, Homo sapiens; identical to SEQ ID NO: 1767
  misc_feature (1)..(78): Pre-microRNA sequence

SEQ ID NO: 2481 - DNA, 74 bp, Homo sapiens
  misc_feature (1)..(74): Pre-microRNA sequence
tggctctaggccaccctggcagctgggccgcactctgccggcctggacgccggggtcggcctctgattggtcca

SEQ ID NO: 2482 - DNA, 89 bp, Homo sapiens
  misc_feature (1)..(89): Pre-microRNA sequence
agcctgtgggaaagagaagagcagggcagggtgaaggcccggcggagacactctgcccaccccacaccctgcctatgggccacacagct

SEQ ID NO: 2483 - DNA, 115 bp, Homo sapiens; identical to SEQ ID NO: 1771
  misc_feature (1)..(115): Pre-microRNA sequence

SEQ ID NO: 2484 - DNA, 84 bp, Homo sapiens; identical to SEQ ID NO: 1773
  misc_feature (1)..(84): Pre-microRNA sequence

SEQ ID NO: 2485 - DNA, 105 bp, Homo sapiens; identical to SEQ ID NO: 1774
  misc_feature (1)..(105): Pre-microRNA sequence

SEQ ID NO: 2486 - DNA, 113 bp, Homo sapiens; identical to SEQ ID NO: 1775
  misc_feature (1)..(113): Pre-microRNA sequence

SEQ ID NO: 2487 - DNA, 108 bp, Homo sapiens; identical to SEQ ID NO: 1779
  misc_feature (1)..(108): Pre-microRNA sequence

SEQ ID NO: 2488 - DNA, 96 bp, Homo sapiens; identical to SEQ ID NO: 1780
  misc_feature (1)..(96): Pre-microRNA sequence

SEQ ID NO: 2489 - DNA, 127 bp, Homo sapiens
  misc_feature (1)..(127): Pre-microRNA sequence
gggagagaaggggcgacgagatcaccagaggggactgacacgcggaccctggcggaaccccacccccttgctttccggtcccccagtcggtgcgtccctccagtggcctctcagctcctcccctccc

SEQ ID NO: 2490 - DNA, 121 bp, Homo sapiens; identical to SEQ ID NO: 1791
  misc_feature (1)..(121): Pre-microRNA sequence

SEQ ID NO: 2491 - DNA, 112 bp, Homo sapiens; identical to SEQ ID NO: 1793
  misc_feature (1)..(112): Pre-microRNA sequence

SEQ ID NO: 2492 - DNA, 116 bp, Homo sapiens
  misc_feature (1)..(116): Pre-microRNA sequence
aagcaagacaccgaggtgggaagggggacgaggaggactgggccctatttctcccatctatgtaaagggagggatatcagggaagtctctgtctgtgtactcaagtttgggatgct

SEQ ID NO: 2493 - DNA, 99 bp, Homo sapiens; identical to SEQ ID NO: 1795
  misc_feature (1)..(99): Pre-microRNA sequence

SEQ ID NO: 2494 - DNA, 90 bp, Homo sapiens; identical to SEQ ID NO: 1800
  misc_feature (1)..(90): Pre-microRNA sequence

SEQ ID NO: 2495 - DNA, 108 bp, Homo sapiens; identical to SEQ ID NO: 1801
  misc_feature (1)..(108): Pre-microRNA sequence

SEQ ID NO: 2496 - DNA, 109 bp, Homo sapiens; identical to SEQ ID NO: 2193
  misc_feature (1)..(109): Pre-microRNA sequence

SEQ ID NO: 2497 - DNA, 99 bp, Homo sapiens; identical to SEQ ID NO: 1805
  misc_feature (1)..(99): Pre-microRNA sequence

SEQ ID NO: 2498 - DNA, 115 bp, Homo sapiens
  misc_feature (1)..(115): Pre-microRNA sequence
gtgctttcttgtccaagcagttgatgaaggcaggtggggtgggagcagccacaatgggggctctgctgaccatctgcccttccaccctacagcacccggcgacaggacaccaggt

SEQ ID NO: 2499 - DNA, 121 bp, Homo sapiens; identical to SEQ ID NO: 1806
  misc_feature (1)..(121): Pre-microRNA sequence

SEQ ID NO: 2500 - DNA, 106 bp, Homo sapiens; identical to SEQ ID NO: 1807
  misc_feature (1)..(106): Pre-microRNA sequence

SEQ ID NO: 2501 - DNA, 121 bp, Homo sapiens; identical to SEQ ID NO: 1808
  misc_feature (1)..(121): Pre-microRNA sequence

SEQ ID NO: 2502 - DNA, 121 bp, Homo sapiens
  misc_feature (1)..(121): Pre-microRNA sequence
tgcttggagtggcagagggcagaggggccatgggaggcaaactttgagcgtgtctcaggagcctaaaacatgagaagcctcagtttccctctcctagaccatctgcttatcctctccaggc

SEQ ID NO: 2503 - DNA, 108 bp, Homo sapiens; identical to SEQ ID NO: 1810
  misc_feature (1)..(108): Pre-microRNA sequence

SEQ ID NO: 2504 - DNA, 91 bp, Homo sapiens; identical to SEQ ID NO: 1816
  misc_feature (1)..(91): Pre-microRNA sequence

SEQ ID NO: 2505 - DNA, 79 bp, Homo sapiens
  misc_feature (1)..(79): Pre-microRNA sequence
actcaggcactgcctctgacgatgctctcccagatctggtacgctcatggggaagagcccagcgccaggcagtgttgga

SEQ ID NO: 2506 - DNA, 121 bp, Homo sapiens; identical to SEQ ID NO: 1820
  misc_feature (1)..(121): Pre-microRNA sequence

SEQ ID NO: 2507 - DNA, 118 bp, Homo sapiens; identical to SEQ ID NO: 1828
  misc_feature (1)..(118): Pre-microRNA sequence

SEQ ID NO: 2508 - DNA, 118 bp, Homo sapiens; identical to SEQ ID NO: 1829
  misc_feature (1)..(118): Pre-microRNA sequence

SEQ ID NO: 2509 - DNA, 113 bp, Homo sapiens; identical to SEQ ID NO: 1775
  misc_feature (1)..(113): Pre-microRNA sequence

SEQ ID NO: 2510 - DNA, 89 bp, Homo sapiens; identical to SEQ ID NO: 1776
  misc_feature (1)..(89): Pre-microRNA sequence

SEQ ID NO: 2511 - DNA, 84 bp, Homo sapiens; identical to SEQ ID NO: 1773
  misc_feature (1)..(84): Pre-microRNA sequence

SEQ ID NO: 2512 - DNA, 105 bp, Homo sapiens; identical to SEQ ID NO: 1774
  misc_feature (1)..(105): Pre-microRNA sequence

SEQ ID NO: 2513 - DNA, 117 bp, Homo sapiens; identical to SEQ ID NO: 1258
  misc_feature (1)..(117): Pre-microRNA sequence

SEQ ID NO: 2514 - DNA, 110 bp, Homo sapiens; identical to SEQ ID NO: 1848
  misc_feature (1)..(110): Pre-microRNA sequence

SEQ ID NO: 2515 - DNA, 102 bp, Homo sapiens; identical to SEQ ID NO: 1854
  misc_feature (1)..(102): Pre-microRNA sequence

SEQ ID NO: 2516 - DNA, 119 bp, Homo sapiens; identical to SEQ ID NO: 1855
  misc_feature (1)..(119): Pre-microRNA sequence

SEQ ID NO: 2517 - DNA, 79 bp, Homo sapiens; identical to SEQ ID NO: 1856
  misc_feature (1)..(79): Pre-microRNA sequence

SEQ ID NO: 2518 - DNA, 121 bp, Homo sapiens; identical to SEQ ID NO: 1858
  misc_feature (1)..(121): Pre-microRNA sequence

SEQ ID NO: 2519 - DNA, 70 bp, Homo sapiens; identical to SEQ ID NO: 1861
  misc_feature (1)..(70): Pre-microRNA sequence

SEQ ID NO: 2520 - DNA, 95 bp, Homo sapiens; identical to SEQ ID NO: 1270
  misc_feature (1)..(95): Pre-microRNA sequence

SEQ ID NO: 2521 - DNA, 75 bp, Homo sapiens; identical to SEQ ID NO: 398
  misc_feature (1)..(75): Pre-microRNA sequence

SEQ ID NO: 2522 - DNA, 110 bp, Homo sapiens; identical to SEQ ID NO: 1869
  misc_feature (1)..(110): Pre-microRNA sequence

SEQ ID NO: 2523 - DNA, 111 bp, Homo sapiens
  misc_feature (1)..(111): Pre-microRNA sequence
gagagtttaaagtctggtggaggagaccgaggtatcactggttattacaatacagtgagccccacattggaaagaccagccacgctcttggtctccgtccccataactctc

SEQ ID NO: 2524 - DNA, 87 bp, Homo sapiens; identical to SEQ ID NO: 401
  misc_feature (1)..(87): Pre-microRNA sequence

SEQ ID NO: 2525 - DNA, 88 bp, Homo sapiens; identical to SEQ ID NO: 404
  misc_feature (1)..(88): Pre-microRNA sequence

SEQ ID NO: 2526 - DNA, 78 bp, Homo sapiens; identical to SEQ ID NO: 407
  misc_feature (1)..(78): Pre-microRNA sequence

SEQ ID NO: 2527 - DNA, 76 bp, Homo sapiens; identical to SEQ ID NO: 409
  misc_feature (1)..(76): Pre-microRNA sequence

SEQ ID NO: 2528 - DNA, 76 bp, Homo sapiens; identical to SEQ ID NO: 1877
  misc_feature (1)..(76): Pre-microRNA sequence

SEQ ID NO: 2529 - DNA, 80 bp, Homo sapiens; identical to SEQ ID NO: 416
  misc_feature (1)..(80): Pre-microRNA sequence

SEQ ID NO: 2530 - DNA, 119 bp, Homo sapiens; identical to SEQ ID NO: 545
  misc_feature (1)..(119): Pre-microRNA sequence

SEQ ID NO: 2531 - DNA, 69 bp, Homo sapiens; identical to SEQ ID NO: 546
  misc_feature (1)..(69): Pre-microRNA sequence

SEQ ID NO: 2532 - DNA, 80 bp, Homo sapiens; identical to SEQ ID NO: 547
  misc_feature (1)..(80): Pre-microRNA sequence

SEQ ID NO: 2533 - DNA, 73 bp, Homo sapiens; identical to SEQ ID NO: 548
  misc_feature (1)..(73): Pre-microRNA sequence

SEQ ID NO: 2534 - DNA, 113 bp, Homo sapiens; identical to SEQ ID NO: 549
  misc_feature (1)..(113): Pre-microRNA sequence

SEQ ID NO: 2535 - DNA, 114 bp, Homo sapiens; identical to SEQ ID NO: 550
  misc_feature (1)..(114): Pre-microRNA sequence

SEQ ID NO: 2536 - DNA, 84 bp, Homo sapiens; identical to SEQ ID NO: 419
  misc_feature (1)..(84): Pre-microRNA sequence

SEQ ID NO: 2537 - DNA, 77 bp, Homo sapiens; identical to SEQ ID NO: 421
  misc_feature (1)..(77): Pre-microRNA sequence

SEQ ID NO: 2538 - DNA, 85 bp, Homo sapiens; identical to SEQ ID NO: 422
  misc_feature (1)..(85): Pre-microRNA sequence

SEQ ID NO: 2539 - DNA, 85 bp, Homo sapiens; identical to SEQ ID NO: 425
  misc_feature (1)..(85): Pre-microRNA sequence

SEQ ID NO: 2540 - DNA, 75 bp, Homo sapiens; identical to SEQ ID NO: 426
  misc_feature (1)..(75): Pre-microRNA sequence

SEQ ID NO: 2541 - DNA, 75 bp, Homo sapiens
  misc_feature (1)..(75): Pre-microRNA sequence
tccacagctccataaatgtttaatgccaccggctgggcaggaatgaggcaggtgctgaaacagggagactgggga

SEQ ID NO: 2542 - DNA, 73 bp, Homo sapiens; identical to SEQ ID NO: 428
  misc_feature (1)..(73): Pre-microRNA sequence

SEQ ID NO: 2543 - DNA, 70 bp, Homo sapiens; identical to SEQ ID NO: 585
  misc_feature (1)..(70): Pre-microRNA sequence

SEQ ID NO: 2544 - DNA, 86 bp, Homo sapiens; identical to SEQ ID NO: 436
  misc_feature (1)..(86): Pre-microRNA sequence

SEQ ID NO: 2545 - DNA, 90 bp, Homo sapiens
  misc_feature (1)..(90): Pre-microRNA sequence
gctcctcgtgctgtgtgaagaccaccggggccgcatggtgaagcaccagtgctgtcctggctgtggctacttctgcacagcggtaagagc

SEQ ID NO: 2546 - DNA, 87 bp, Homo sapiens; identical to SEQ ID NO: 1935
  misc_feature (1)..(87): Pre-microRNA sequence

SEQ ID NO: 2547 - DNA, 80 bp, Homo sapiens; identical to SEQ ID NO: 1279
  misc_feature (1)..(80): Pre-microRNA sequence

SEQ ID NO: 2548 - DNA, 71 bp, Homo sapiens
  misc_feature (1)..(71): Pre-microRNA sequence
caaattacatctgtttatgcttctatttgttagacaatctggcaccgggaacagctgagcagaaggatttg

SEQ ID NO: 2549 - DNA, 74 bp, Homo sapiens; identical to SEQ ID NO: 466
  misc_feature (1)..(74): Pre-microRNA sequence

SEQ ID NO: 2550 - DNA, 86 bp, Homo sapiens; identical to SEQ ID NO: 471
  misc_feature (1)..(86): Pre-microRNA sequence

SEQ ID NO: 2551 - DNA, 84 bp, Homo sapiens; identical to SEQ ID NO: 473
  misc_feature (1)..(84): Pre-microRNA sequence

SEQ ID NO: 2552 - DNA, 90 bp, Homo sapiens; identical to SEQ ID NO: 553
  misc_feature (1)..(90): Pre-microRNA sequence

SEQ ID NO: 2553 - DNA, 82 bp, Homo sapiens; identical to SEQ ID NO: 489
  misc_feature (1)..(82): Pre-microRNA sequence

SEQ ID NO: 2554 - DNA, 81 bp, Homo sapiens; identical to SEQ ID NO: 625
  misc_feature (1)..(81): Pre-microRNA sequence

SEQ ID NO: 2555 - DNA, 82 bp, Homo sapiens; identical to SEQ ID NO: 1979
  misc_feature (1)..(82): Pre-microRNA sequence

SEQ ID NO: 2556 - DNA, 75 bp, Homo sapiens; identical to SEQ ID NO: 493
  misc_feature (1)..(75): Pre-microRNA sequence

SEQ ID NO: 2557 - DNA, 78 bp, Homo sapiens; identical to SEQ ID NO: 496
  misc_feature (1)..(78): Pre-microRNA sequence

SEQ ID NO: 2558 - DNA, 80 bp, Homo sapiens; identical to SEQ ID NO: 500
  misc_feature (1)..(80): Pre-microRNA sequence

SEQ ID NO: 2559 - DNA, 89 bp, Homo sapiens; identical to SEQ ID NO: 507
  misc_feature (1)..(89): Pre-microRNA sequence

SEQ ID NO: 2560 - DNA, 87 bp, Homo sapiens; identical to SEQ ID NO: 509
  misc_feature (1)..(87): Pre-microRNA sequence

SEQ ID NO: 2561 - DNA, 75 bp, Homo sapiens; identical to SEQ ID NO: 517
  misc_feature (1)..(75): Pre-microRNA sequence

SEQ ID NO: 2562 - DNA, 84 bp, Homo sapiens; identical to SEQ ID NO: 523
  misc_feature (1)..(84): Pre-microRNA sequence

SEQ ID NO: 2563 - DNA, 87 bp, Homo sapiens; identical to SEQ ID NO: 525
  misc_feature (1)..(87): Pre-microRNA sequence

SEQ ID NO: 2564 - DNA, 73 bp, Homo sapiens; identical to SEQ ID NO: 671
  misc_feature (1)..(73): Pre-microRNA sequence

SEQ ID NO: 2565 - DNA, 80 bp, Homo sapiens; identical to SEQ ID NO: 1335
  misc_feature (1)..(80): Pre-microRNA sequence

SEQ ID NO: 2566 - DNA, 54 bp, Homo sapiens
  misc_feature (1)..(54): Pre-microRNA sequence
ccccgcatgggtggttcagtggcagaattctcaaattgtaatccccataatccc

SEQ ID NO: 2567 - DNA, 72 bp, Homo sapiens; identical to SEQ ID NO: 695
  misc_feature (1)..(72): Pre-microRNA sequence

SEQ ID NO: 2568 - DNA, 69 bp, Homo sapiens; identical to SEQ ID NO: 720
  misc_feature (1)..(69): Pre-microRNA sequence

SEQ ID NO: 2569 - DNA, 94 bp, Homo sapiens; identical to SEQ ID NO: 722
  misc_feature (1)..(94): Pre-microRNA sequence

SEQ ID NO: 2570 - DNA, 68 bp, Homo sapiens; identical to SEQ ID NO: 725
  misc_feature (1)..(68): Pre-microRNA sequence

SEQ ID NO: 2571 - DNA, 100 bp, Homo sapiens; identical to SEQ ID NO: 735
  misc_feature (1)..(100): Pre-microRNA sequence

SEQ ID NO: 2572 - DNA, 100 bp, Homo sapiens; identical to SEQ ID NO: 739
  misc_feature (1)..(100): Pre-microRNA sequence

SEQ ID NO: 2573 - DNA, 93 bp, Homo sapiens; identical to SEQ ID NO: 741
  misc_feature (1)..(93): Pre-microRNA sequence

SEQ ID NO: 2574 - DNA, 98 bp, Homo sapiens; identical to SEQ ID NO: 745
  misc_feature (1)..(98): Pre-microRNA sequence

SEQ ID NO: 2575 - DNA, 55 bp, Homo sapiens; identical to SEQ ID NO: 748
  misc_feature (1)..(55): Pre-microRNA sequence

SEQ ID NO: 2576 - DNA, 17 bp, Homo sapiens
  misc_feature (1)..(17): microRNA candidate sequence
tctactgcctgctgctc

SEQ ID NO: 2577 - DNA, 17 bp, Homo sapiens
  misc_feature (1)..(17): microRNA candidate sequence
ggagggggtgggcaggg

SEQ ID NO: 2578 - DNA, 17 bp, Homo sapiens
  misc_feature (1)..(17): microRNA candidate sequence
agagggatgtttggcgc

SEQ ID NO: 2579 - DNA, 19 bp, Homo sapiens
  misc_feature (1)..(19): microRNA candidate sequence
cagagaaggctggaggagg

SEQ ID NO: 2580 - DNA, 17 bp, Homo sapiens
  misc_feature (1)..(17): microRNA candidate sequence
aacacatgtttgaaagt

SEQ ID NO: 2581 - DNA, 19 bp, Homo sapiens
  misc_feature (1)..(19): microRNA candidate sequence
catgtcagcctagtttccc

SEQ ID NO: 2582 - DNA, 18 bp, Homo sapiens
  misc_feature (1)..(18): microRNA candidate sequence
aaagaagggaagagaaga

SEQ ID NO: 2583 - DNA, 18 bp, Homo sapiens
  misc_feature (1)..(18): microRNA candidate sequence
gtcggcgtctccatcctg

SEQ ID NO: 2584 - DNA, 17 bp, Homo sapiens
  misc_feature (1)..(17): microRNA candidate sequence
agagggagaagaaacaa

SEQ ID NO: 2585 - DNA, 18 bp, Homo sapiens
  misc_feature (1)..(18): microRNA candidate sequence
ccaccaccgccaccaccc

SEQ ID NO: 2586 - DNA, 17 bp, Homo sapiens
  misc_feature (1)..(17): microRNA candidate sequence
agttgttggattgcaga

SEQ ID NO: 2587 - DNA, 17 bp, Homo sapiens
  misc_feature (1)..(17): microRNA candidate sequence
caggaaggggctggggg

SEQ ID NO: 2588 - DNA, 23 bp, Homo sapiens
  misc_feature (1)..(23): microRNA candidate sequence
cccggagagcggagcacaacaca

SEQ ID NO: 2589 - DNA, 19 bp, Homo sapiens
  misc_feature (1)..(19): microRNA candidate sequence
ccggagagcggagcacaac

SEQ ID NO: 2590 - DNA, 17 bp, Homo sapiens
  misc_feature (1)..(17): microRNA candidate sequence
gaggaaaaggaaggagg

SEQ ID NO: 2591 - DNA, 22 bp, Homo sapiens
  misc_feature (1)..(22): microRNA candidate sequence
ctgtgggtggaaggtgccagaa

SEQ ID NO: 2592 - DNA, 21 bp, Homo sapiens
  misc_feature (1)..(21): microRNA candidate sequence
aagttaaataactctgaacca

SEQ ID NO: 2593 - DNA, 22 bp, Homo sapiens
  misc_feature (1)..(22): microRNA candidate sequence
atgtgccgagatgtgagcagtc

SEQ ID NO: 2594 - DNA, 24 bp, Homo sapiens
  misc_feature (1)..(24): microRNA candidate sequence
atgtgccgagatgtgagcagtcac

SEQ ID NO: 2595 - DNA, 18 bp, Homo sapiens
  misc_feature (1)..(18): microRNA candidate sequence
ccaaggaaggcagcaggc

SEQ ID NO: 2596 - DNA, 22 bp, Homo sapiens
  misc_feature (1)..(22): microRNA candidate sequence
ttggggtggtcggccctggagg

SEQ ID NO: 2597 - DNA, 18 bp, Homo sapiens
  misc_feature (1)..(18): microRNA candidate sequence
gatggaatttcctaaagg

SEQ ID NO: 2598 - DNA, 17 bp, Homo sapiens
  misc_feature (1)..(17): microRNA candidate sequence
ggaggggaggagacatg

SEQ ID NO: 2599 - DNA, 17 bp, Homo sapiens
  misc_feature (1)..(17): microRNA candidate sequence
ggaggggaggagacatg

SEQ ID NO: 2600 - DNA, 17 bp, Homo sapiens
  misc_feature (1)..(17): microRNA candidate sequence
gggagggagagaaggag

SEQ ID NO: 2601 - DNA, 18 bp, Homo sapiens
  misc_feature (1)..(18): microRNA candidate sequence
gggagggagagaaggagg

SEQ ID NO: 2602 - DNA, 20 bp, Homo sapiens
  misc_feature (1)..(20): microRNA candidate sequence
gggagggagagaaggagggg

SEQ ID NO: 2603 - DNA, 17 bp, Homo sapiens
  misc_feature (1)..(17): microRNA candidate sequence
agagggaagaaaaaaaa

SEQ ID NO: 2604 - DNA, 22 bp, Homo sapiens
  misc_feature (1)..(22): microRNA candidate sequence
agtgggcaggaagaaccaggct

SEQ ID NO: 2605 - DNA, 22 bp, Homo sapiens
  misc_feature (1)..(22): microRNA candidate sequence
agagctgagactagaaagccca

SEQ ID NO: 2606 - DNA, 22 bp, Homo sapiens
  misc_feature (1)..(22): microRNA candidate sequence
ttggggtggtcggccctggagg

SEQ ID NO: 2607 - DNA, 22 bp, Homo sapiens
  misc_feature (1)..(22): microRNA candidate sequence
gggagtagaagggaaagactat

SEQ ID NO: 2608 - DNA, 23 bp, Homo sapiens
  misc_feature (1)..(23): microRNA candidate sequence
gaggtcgggaggggaaggcggct

SEQ ID NO: 2609 - DNA, 17 bp, Homo sapiens
  misc_feature (1)..(17): microRNA candidate sequence
tcaaggagctcacagtc

SEQ ID NO: 2610 - DNA, 19 bp, Homo sapiens
  misc_feature (1)..(19): microRNA candidate sequence
gcatgagtggttcagtggt

SEQ ID NO: 2611 - DNA, 21 bp, Homo sapiens
  misc_feature (1)..(21): microRNA candidate sequence
tgacttctacctcttccaaag

SEQ ID NO: 2612 - DNA, 17 bp, Homo sapiens
  misc_feature (1)..(17): microRNA candidate sequence
tgagggagggtgggagc

SEQ ID NO: 2613 - DNA, 22 bp, Homo sapiens
  misc_feature (1)..(22): microRNA candidate sequence
gtggagtcctggggaatggaga

SEQ ID NO: 2614 - DNA, 23 bp, Homo sapiens
  misc_feature (1)..(23): microRNA candidate sequence
agggtggggtggctcctctgcag

SEQ ID NO: 2615 - DNA, 19 bp, Homo sapiens
  misc_feature (1)..(19): microRNA candidate sequence
tccctgtcctccacaagct

SEQ ID NO: 2616 - DNA, 17 bp, Homo sapiens
  misc_feature (1)..(17): microRNA candidate sequence
cagcagcaaggtggtgg

SEQ ID NO: 2617 - DNA, 21 bp, Homo sapiens
  misc_feature (1)..(21): microRNA candidate sequence
tggtgccgagtgctcagagtg

SEQ ID NO: 2618 - DNA, 26 bp, Homo sapiens
  misc_feature (1)..(26): microRNA candidate sequence
agtgggaggggaggggagtcctgcca

SEQ ID NO: 2619 - DNA, 17 bp, Homo sapiens
  misc_feature (1)..(17): microRNA candidate sequence
tgaggggccgggagcca

SEQ ID NO: 2620 - DNA, 18 bp, Homo sapiens
  misc_feature (1)..(18): microRNA candidate sequence
tagccccatttcacagat

SEQ ID NO: 2621 - DNA, 20 bp, Homo sapiens
  misc_feature (1)..(20): microRNA candidate sequence
gctgcagggaggtgtgggga

SEQ ID NO: 2622 - DNA, 19 bp, Homo sapiens
  misc_feature (1)..(19): microRNA candidate sequence
agtgtggagggggtggtga

SEQ ID NO: 2623 - DNA, 21 bp, Homo sapiens
  misc_feature (1)..(21): microRNA candidate sequence
tgggaataggagagggcactg

SEQ ID NO: 2624 - DNA, 23 bp, Homo sapiens
  misc_feature (1)..(23): microRNA candidate sequence
tgccccacctgctgaccaccctc

SEQ ID NO: 2625 - DNA, 21 bp, Homo sapiens
  misc_feature (1)..(21): microRNA candidate sequence
aaccttggcccctctccccag

SEQ ID NO: 2626 - DNA, 22 bp, Homo sapiens
  misc_feature (1)..(22): microRNA candidate sequence
gtggagtcctggggaatggaga

SEQ ID NO: 2627 - DNA, 20 bp, Homo sapiens
  misc_feature (1)..(20): microRNA candidate sequence
caaagtgagtctagtctgca

SEQ ID NO: 2628 - DNA, 18 bp, Homo sapiens
  misc_feature (1)..(18): microRNA candidate sequence
ttggggggacacgggtgg

SEQ ID NO: 2629 - DNA, 26 bp, Homo sapiens
  misc_feature (1)..(26): microRNA candidate sequence
agctgtggtcaccggagctcagaggc

SEQ ID NO: 2630 - DNA, 22 bp, Homo sapiens
  misc_feature (1)..(22): microRNA candidate sequence
gagggtctgactgtcacttgga

SEQ ID NO: 2631 - DNA, 22 bp, Homo sapiens
  misc_feature (1)..(22): microRNA candidate sequence
gagggtctgatggccacttgga

SEQ ID NO: 2632 - DNA, 22 bp, Homo sapiens
  misc_feature (1)..(22): microRNA candidate sequence
caggaggacgtcacacacagtg

SEQ ID NO: 2633 - DNA, 21 bp, Homo sapiens
  misc_feature (1)..(21): microRNA candidate sequence
taggtggtagaagggcaaaca

SEQ ID NO: 2634 - DNA, 20 bp, Homo sapiens
  misc_feature (1)..(20): microRNA candidate sequence
cccagtgttcagacttcctg

SEQ ID NO: 2635 - DNA, 21 bp, Homo sapiens
  misc_feature (1)..(21): microRNA candidate sequence
tggagagagaggcctggaaga

SEQ ID NO: 2636 - DNA, 22 bp, Homo sapiens
  misc_feature (1)..(22): microRNA candidate sequence
tggagagagaggcctggaagat

SEQ ID NO: 2637 - DNA, 20 bp, Homo sapiens
  misc_feature (1)..(20): microRNA candidate sequence
tgtgaggaagctaagagcag

SEQ ID NO: 2638 - DNA, 17 bp, Homo sapiens
  misc_feature (1)..(17): microRNA candidate sequence
agtgcagtggtgtgatc

SEQ ID NO: 2639 - DNA, 17 bp, Homo sapiens
  misc_feature (1)..(17): microRNA candidate sequence
gcaggggaagaagcctt

SEQ ID NO: 2640 - DNA, 21 bp, Homo sapiens
  misc_feature (1)..(21): microRNA candidate sequence
gggggacccaggggaaggagg

SEQ ID NO: 2641 - DNA, 21 bp, Homo sapiens
  misc_feature (1)..(21): microRNA candidate sequence
acagcctcccttgcgccacag

SEQ ID NO: 2642 - DNA, 21 bp, Homo sapiens
  misc_feature (1)..(21): microRNA candidate sequence
ttagaaaaagagggggtgagg

SEQ ID NO: 2643 - DNA, 17 bp, Homo sapiens
  misc_feature (1)..(17): microRNA candidate sequence
gcggcggcggcggcggc

SEQ ID NO: 2644 - DNA, 18 bp, Homo sapiens
  misc_feature (1)..(18): microRNA candidate sequence
tggggtgtggaggggagg

SEQ ID NO: 2645 - DNA, 17 bp, Homo sapiens
  misc_feature (1)..(17): microRNA candidate sequence
aggggagcagggaggaa

SEQ ID NO: 2646 - DNA, 17 bp, Homo sapiens
  misc_feature (1)..(17): microRNA candidate sequence
gcagggaggaaggagaa

SEQ ID NO: 2647 - DNA, 20 bp, Homo sapiens
  misc_feature (1)..(20): microRNA candidate sequence
tggagagggatgaaggagat

SEQ ID NO: 2648 - DNA, 23 bp, Homo sapiens
  misc_feature (1)..(23): microRNA candidate sequence
tctgcccagtgctctgaatgtca

SEQ ID NO: 2649 - DNA, 20 bp, Homo sapiens
  misc_feature (1)..(20): microRNA candidate sequence
ccagtgctctgaatgtcaaa

SEQ ID NO: 2650 - DNA, 19 bp, Homo sapiens
  misc_feature (1)..(19): microRNA candidate sequence
tggagagggatgaaggaga

SEQ ID NO: 2651 - DNA, 17 bp, Homo sapiens
  misc_feature (1)..(17): microRNA candidate sequence
gaggaaggaaggggaaa

SEQ ID NO: 2652 - DNA, 18 bp, Homo sapiens
  misc_feature (1)..(18): microRNA candidate sequence
aggaaggaaggggaaaaa

SEQ ID NO: 2653 - DNA, 20 bp, Homo sapiens
  misc_feature (1)..(20): microRNA candidate sequence
ccttgatgtcctgcaaatga

SEQ ID NO: 2654 - DNA, 18 bp, Homo sapiens
  misc_feature (1)..(18): microRNA candidate sequence
atgagatactgtcggaga

SEQ ID NO: 2655 - DNA, 22 bp, Homo sapiens
  misc_feature (1)..(22): microRNA candidate sequence
ctgctggagaaaggggaggagg

SEQ ID NO: 2656 - DNA, 18 bp, Homo sapiens
  misc_feature (1)..(18): microRNA candidate sequence
ttcatttctctttcataa

SEQ ID NO: 2657 - DNA, 20 bp, Homo sapiens
  misc_feature (1)..(20): microRNA candidate sequence
acttctggagcccaggaaca

SEQ ID NO: 2658 - DNA, 20 bp, Homo sapiens
  misc_feature (1)..(20): microRNA candidate sequence
tagttggaggaaaattggag

SEQ ID NO: 2659 - DNA, 20 bp, Homo sapiens
  misc_feature (1)..(20): microRNA candidate sequence
tgcccagtgctctgaatgtc

SEQ ID NO: 2660 - DNA, 18 bp, Homo sapiens
  misc_feature (1)..(18): microRNA candidate sequence
acggcgggagtaactatg

SEQ ID NO: 2661 - DNA, 19 bp, Homo sapiens
  misc_feature (1)..(19): microRNA candidate sequence
aaatggatttttggagcag

SEQ ID NO: 2662 - DNA, 17 bp, Homo sapiens
  misc_feature (1)..(17): microRNA candidate sequence
aggggaagtggtgggtg

SEQ ID NO: 2663 - DNA, 17 bp, Homo sapiens
  misc_feature (1)..(17): microRNA candidate sequence
gtgggtgggggaggggg

SEQ ID NO: 2664 - DNA, 18 bp, Homo sapiens
  misc_feature (1)..(18): microRNA candidate sequence
ggaggggcagagagagag

SEQ ID NO: 2665 - DNA, 17 bp, Homo sapiens
  misc_feature (1)..(17): microRNA candidate sequence
aggtgggcactctaagg

SEQ ID NO: 2666 - DNA, 17 bp, Homo sapiens
  misc_feature (1)..(17): microRNA candidate sequence
tggttggggagaagaca

SEQ ID NO: 2667 - DNA, 19 bp, Homo sapiens
  misc_feature (1)..(19): microRNA candidate sequence
tgcaagatcagaggggaga

SEQ ID NO: 2668 - DNA, 17 bp, Homo sapiens
  misc_feature (1)..(17): microRNA candidate sequence
tcctcttctcctcttct

SEQ ID NO: 2669 - DNA, 20 bp, Homo sapiens
  misc_feature (1)..(20): microRNA candidate sequence
cggtggagggaaaggggaaa

SEQ ID NO: 2670 - DNA, 17 bp, Homo sapiens
  misc_feature (1)..(17): microRNA candidate sequence
aacaccccagccatgta

SEQ ID NO: 2671 - DNA, 22 bp, Homo sapiens
  misc_feature (1)..(22): microRNA candidate sequence
caaagtgggggaaaaacaggtg

SEQ ID NO: 2672 - DNA, 17 bp, Homo sapiens
  misc_feature (1)..(17): microRNA candidate sequence
tccgagacctggagcag

SEQ ID NO: 2673 - DNA, 34 bp, Artificial Sequence
  Synthetic probe
ctgctgccttccttggttgaggggcctgagcacg

SEQ ID NO: 2674 - DNA, 34 bp, Artificial Sequence
  Synthetic probe
tcaccgtgcctccctttggaagaggtagaagtca

SEQ ID NO: 2675 - DNA, 34 bp, Artificial Sequence; identical to SEQ ID NO: 1469
  Synthetic probe

SEQ ID NO: 2676 - DNA, 32 bp, Artificial Sequence
  Synthetic probe
cccgaacccactctgagcactcggcaccagca

SEQ ID NO: 2677 - DNA, 33 bp, Artificial Sequence
  Synthetic probe
acaagtttctcaggaagtctgaacactgggttt

SEQ ID NO: 2678 - DNA, 31 bp, Artificial Sequence
  Synthetic probe
tgcctgctcagcctcccacatctgttcctgg

SEQ ID NO: 2679 - DNA, 30 bp, Artificial Sequence
  Synthetic probe
gaaaacctcacccaccagatccgggaacga

SEQ ID NO: 2680 - DNA, 32 bp, Artificial Sequence
  Synthetic probe
aaatgcaaatgccccctaaggagaagaacttc

SEQ ID NO: 2681 - DNA, 89 bp, Homo sapiens
  misc_feature (1)..(89): pre-microRNA sequence
ttcccacacgtgctcaggcccctcaaccaaggaaggcagcaggcccactggcctccttattcagaggggctgcactgcaccctagggag

SEQ ID NO: 2682 - DNA, 121 bp, Homo sapiens
  misc_feature (1)..(121): pre-microRNA sequence
gtcacacagttatgttaggccatcacagcattggaataggggatatctcagcatgttgagccctgtctctggggagctgacttctacctcttccaaagggaggcacggtgattggaagtgc

SEQ ID NO: 2683 - DNA, 114 bp, Homo sapiens; identical to SEQ ID NO: 1818
  misc_feature (1)..(114): pre-microRNA sequence

SEQ ID NO: 2684 - DNA, 81 bp, Homo sapiens
  misc_feature (1)..(81): pre-microRNA sequence
tgcggagtgctggtgccgagtgctcagagtgggttcgggttcagtccctgaacccaagcatcctctgcacccagatcctgc

SEQ ID NO: 2685 - DNA, 65 bp, Homo sapiens
  misc_feature (1)..(65): pre-microRNA sequence
aacagtccagggaaatgacagttgagttgcacaaacccagtgttcagacttcctgagaaacttgt

SEQ ID NO: 2686 - DNA, 84 bp, Homo sapiens; identical to SEQ ID NO: 442
  misc_feature (1)..(84): pre-microRNA sequence

SEQ ID NO: 2687 - DNA, 77 bp, Homo sapiens; identical to SEQ ID NO: 470
  misc_feature (1)..(77): pre-microRNA sequence

SEQ ID NO: 2688 - DNA, 83 bp, Homo sapiens
  misc_feature (1)..(83): pre-microRNA sequence
gaagttcttctccttagggggcatttgcattttaatgggaatcttaaaaacccaaaggaaatgttctctaatggtgggatttc

SEQ ID NO: 2689 - DNA, 20 bp, Artificial Sequence
  Synthetic probe
accctctcaacccagctttt

SEQ ID NO: 2690 - DNA, 138 bp, Homo sapiens
  misc_feature (1)..(138): pre-microRNA sequence
tttgcattaaaaatgaggccttctcttcccagttcttcccagagtcaggaaaagctgggttgagagggtagaaaaaaaatgatgtaggcttctctttccagttcttcccagaattgggaaaagctgggttgagagggt

SEQ ID NO: 2691 - DNA, 50 bp, Homo sapiens
  misc_feature (1)..(50): pre-microRNA sequence
cttctctttccagttcttcccagaattgggaaaagctgggttgagagggt

SEQ ID NO: 2692 - RNA, 20 nt, Homo sapiens
aaaagcuggguugagagggu
